(19) United States
(12) Patent Application Publication
(10) Pub. No.: US 2009/0253583 A1
(43) Pub. Date: Oct. 8, 2009

(54) Hematological Cancer Profiling System

(75) Inventor: Thillainathan Yoganathan, Richmond (CA)

Correspondence Address: MORRISON & FOERSTER LLP, 12531 HIGH BLUFF DRIVE, SUITE 100, SAN DIEGO, CA, 92130-2040, US

(73) Assignee: MED BIOGENE INC., Vancouver, BC (CA)

(21) Appl. No.: 11/576,143

(22) PCT Filed: Sep. 27, 2005
(86) PCT No.: PCT/CA05/01464

§ 371 Date: Jul. 21, 2008

Related U.S. Application Data
(60) Provisional application No. 60/613,980, filed on Sep. 27, 2004.

(51) Int. Cl. C40B 40/06; C40B 30/04; C40B 50/00; C40B 30/00; C07H 21/00

(52) U.S. Cl. 506/9; 506/16; 506/23; 506/7; 536/24.31

(57) ABSTRACT

A system for profiling lymphoma is provided that is based on the identification of sets of genes, which are characterized in that changes in expression of each gene within a set of genes can be correlated to one or more features of a specific lymphoma. The lymphoma profiling system provides for sets of “lymphoma profiling” genes and further provides for combinations of polynucleotide probes derived from one or more of the lymphoma profiling sets. These combinations of polynucleotide probes can be provided in solution or as an array. The combination of probes and the arrays can be used for disease prognosis, diagnosis, staging or grading, treatment management, monitoring of disease progression, predicting disease outcome or complications, and the like.

### FIELD OF THE INVENTION

[0001] The present invention relates to the field of cancer diagnosis and profiling and, in particular, to tools for diagnosing and profiling hematological cancers.

### BACKGROUND OF THE INVENTION

[0002] Hematological cancers are cancers of the blood and lymphatic system. These cancers usually affect the white blood cells (disease and infection-fighting cells) rather than the red blood cells (oxygen-carrying cells), and can occur in the marrow where all blood cells are made, or in the lymph nodes and other lymph tissues that the white blood cells flow through. Common hematological cancers are leukemia, lymphoma, and myeloma.

[0003] Lymphoma is a type of cancer affecting cells in the lymph system, and is most commonly caused by mutations in the genetic material of a B-cell or T-cell lymphocyte. Lymphocytes with these mutations lose their ability to control their own multiplication and are, therefore, able to overtake healthy tissue and form tumors. The type of mutation and the stage of development at which it occurs determine what class or type of lymphoma will arise. Since lymphocytes undergo several stages of hematopoietic differentiation during development from stem cell to mature B- or T-cell, many classes of lymphoma have been identified (Staudt L M. N Engl J Med. 2003; 348(18):1777-85. [Erratum: N Engl J Med. 2003; 348(25):2588.]) Correct identification of lymphoma types and/or sub-types is critical since different types of lymphomas have varied prognoses, and treatments for the various types may be entirely different (Soukup J, Krskova L, Mrhalova M, et al. Cas Lek Cesk. 2003; 142(7):417-2). Furthermore, recent studies have shown that within a single disease classification, the response to treatment between individuals can vary. For example, a group of patients were diagnosed with diffuse large cell B-cell lymphoma (DLBCL) by pathologists and treated. Some of these patients responded well to the treatment and were completely cured, but others did not and succumbed to the disease within a year (Alizadeh A A, Eisen M B, Davis R E et al. Nature. 2000; 403(6769):503-11).

[0004] In broadest terms, lymphomas can be classified as Hodgkin's disease or lymphoma (HD or HL) and non-Hodgkin's lymphoma (NHL). NHL can be further classified according to the type of lymphocyte affected, i.e. B-cell lymphomas or T-cell lymphomas.

[0005] The World Health Organization (WHO) has grouped non-Hodgkin's lymphomas into classes based on a combination of morphology, immunology, genetic features, and clinical features. According to this classification system, mature (peripheral) B-cell lymphomas have been classified into the following types: B-cell chronic lymphocytic leukemia/small lymphocytic lymphoma (CLL/SLL), B-cell prolymphocytic leukemia, lymphoplamacytic lymphoma, splenic marginal zone B-cell lymphoma, nodal marginal zone B-cell lymphoma, hairy cell leukemia, plasma cell myeloma/plasmacytoma, follicular lymphoma (FL), mantle cell lymphoma (MCL), Burkitt's lymphoma, and DLBCL. Hodgkin's lymphoma is also of B-cell origin.

[0006] DLBCL is an aggressive form of lymphoma that has a mortality rate of 50-60%. The WHO has sub-classified DLBCL into broad categories, thus making an accurate diagnosis difficult (Alizadeh A A, Eisen M B, Davis R E et al. Nature. 2000; 403(6769):503-11). More recently, however, molecular profiling of hundreds of DLBCL patient samples has resulted in the identification of the following sub-types of DLBCL based on gene expression patterns: a sub-type derived from differentiated activated peripheral blood B-cells (ABC), a second sub-type derived from the undifferentiated germinal centers of lymph nodes (GC), a third sub-type called mediastinal large B-cell lymphoma (MLBCL), and a fourth sub-type that remains largely heterogeneous (Rosenwald A, Wright G, Chan W C et al. N Engl J Med. 2002, 346(25):1937-47; Rosenwald A, Wright G, Leroy K. et al. J Exp Med. 2003, 198(6):851-62; Wright G, Tan B, Rosenwald A, et al. Proc Natl Acad Sci USA. 2003, 100(17):9991-6; Savage K J, Monti S, Kutok J L, et al. Blood. 2003, 102(12):3871-9).

[0007] T-cell lymphomas have been classified into the following types: lymphoblastic lymphoma, anaplastic large cell lymphoma (ALCL), subcutaneous T-cell lymphoma, mycosis fungoids/Sézary's syndrome, peripheral T-cell lymphomas, angioimmunoblastic lymphoma, angiocentric lymphoma (nasal T-cell lymphoma), intestinal T-cell lymphoma, and adult T-cell lymphoma/leukemia.

[0008] Despite efforts of the WHO and other organizations to classify lymphomas, these cancers are difficult to classify since there is no single marker that clinicians can consider to classify all of the various types of lymphoma (Harris N L, Jaffe E S, Diebold J et al. Ann Oncol. 2000; 11 Suppl 1:3-10). In most cases, physicians must employ a variety of techniques to clearly identify a patient's disease. These techniques include gross and microscopic morphological examination, detection of characteristic chromosomal rearrangements, and detection of aberrant gene expression. The complexity and subjectivity involved in interpreting the results obtained using these techniques add further challenges to clinicians and pathologists trying to diagnose and treat a patient with lymphoma.

[0009] Leukemia is a cancer of the white blood cells that starts in the bone marrow and spreads to the blood, lymph nodes, and other organs. Both children and adults can develop leukemia, which is a complex disease with many different types and sub-types. The treatment given and the outlook for patients with leukemia varies greatly according to the exact type and other individual factors. Leukemias are classified into types based on the kind of blood cell they involve, either lymphoid or myeloid, as well as the speed of disease progression, either acute or chronic. Acute lymphocytic leukemia (ALL) is the most common form of leukemia among children, often striking during infancy. Acute myelogenous leukemia (AML) occurs in both adults and children, while cases of chronic lymphocytic leukemia (CLL) and chronic myelogenous leukemia (CML) are seen mainly in adults. Many leukemia subtypes exist within the various types. Subtypes are often defined by a specific mutation they share. Common subtypes include; MLL, T-ALL (T-cell acute lymphoblastic leukemia), BCR-ABL, TEL-AML1, E2A-PBX1, ALL with t(4;11). As for lymphoma, accurately distinguishing between the different types and subtypes of leukemia is critical for making correct diagnoses and for choosing the most beneficial treatment protocol. Current methods used to diagnose leukemia and distinguish types and subtypes of leukemia involve examination of a patient's medical history, a physical examination, complete blood counts, a bone marrow examination, cytogenetic studies, molecular diagnostics and immunophenotyping, followed by, in some cases assigning the patient to a specific risk group. This process can be difficult and expensive.

[0010] The advent of DNA array technology has allowed high-throughput analysis of gene expression in both lymphoma and leukemia. For example, “molecular profiling” of lymphomas has facilitated the identification of predictive factors or biomarkers that may potentially be used to characterize lymphomas. The “Lymphochip,” for example, has been used to identify sub-types of one specific type of lymphoma, DLBCL, and contains a total of 17,856 cDNA clones, the majority of which are derived from a germinal centre B-cell library, as well as cDNA clones derived from DLBCL, FL, MCL, and CLL libraries (Alizadeh A A, Eisen M B, Davis R E et al. Nature. 2000; 403(6769):503-11)). An oligonucleotide array has also been described, which was used to analyze the expression of 6,817 genes in diagnostic tumor specimens from DLBCL patients (Shipp M A, Ross K N, Tamayo P et al. Nat Med. 2002 January; 8(1):68-74). This array was used to predict outcome (cured vs. fatal) in this specific type of lymphoma and to identify potential therapeutic targets.

[0011] Other publications have described the use of oligonucleotide microarrays to accurately distinguish subtypes of leukemia. A commercially available microarray containing probes for 6817 genes was used to classify leukemia and identify a set of genes as class predictors (Golub T R, Slonim D K, Tamayo P, Huard C, Gaasenbeek M, Mesirov J P, Coller H, Loh M L, Downing J R, Caligiuri M A, Bloomfield C D and E S Lander. Science 1999 Oct. 15; 286(5439): 531-537). Others have used a commercially available microarray (Affymetrix U133A) to distinguish various subtypes of pediatric ALL with 96% accuracy (Ross M E, Zhou X, Song G, Shurtleff S A, Girtman K, Williams W K, Liu H C, Mahfouz R, Raimondi S C, Lenny N, Patel A and J R Downing. Blood 2003 Oct. 15; 102(8): 2951-2959).

[0012] In addition, U.S. Patent Application No. 20020110820 describes fourteen collections of 1000 genes, each representing a different cancer, including lymphoma and leukemia. Methods of using these collections to identify a tumor, predict the likelihood of tumor development, diagnose a tumor, or identify a compound for use in treating cancer are also described. The patent application further describes an oligonucleotide array containing a plurality of oligonucleotide probes specific for the genes in these collections.

[0013] U.S. Patent Application No. 20030175761 describes a group of 120 genes whose expression patterns allow differentiation between benign lymph node tissue, FL, MCL, and SLL. This patent application further describes nucleic acid arrays containing probes for these genes. U.S. Patent Application No. 20030219760 describes methods for diagnosing biological states or conditions based on ratios of gene expression data from tissue samples, such as cancer tissue samples. The application describes a method based on focused microarray-based profiling that permits confirmation of the presence of malignant pleural mesothelioma. The application also indicates that the method is applicable to a variety of other cancers, including lymphomas and leukemias, and lists sets of genes that were selected based on analysis of gene expression data presented in the prior art. The listed genes include genes that are differentially expressed in different sub-types of DLBCL, that are over-expressed in DLBCL and FL, and that are over-expressed in DLBCL of good and poor outcome.

[0014] U.S. Patent Application No. 20040018513 describes methods and compositions useful for diagnosing and choosing treatment for leukemia patients. These methods are based on analysis of gene expression using HG_U95Av2 Affymetrix™ oligonucleotide arrays, and relate to patients that can be assigned to a leukemia risk group selected from T-ALL, E2A-PBX1, TEL-AML1, BCR-ABL, MLL, Hyperdiploid >50, and a risk group called “Novel,” which is distinguishable from the others in the list based on expression profiling. The methods can be used to assign a subject affected by leukemia to a leukemia risk group, predict increased risk of relapse, predict increased risk of developing secondary acute myeloid leukemia, determine prognosis, choose therapy, and monitor disease state. The application also describes arrays having capture probes for the differentially-expressed genes described therein.

[0015] This background information is provided for the purpose of making known information believed by the applicant to be of possible relevance to the present invention. No admission is necessarily intended, nor should be construed, that any of the preceding information constitutes prior art against the present invention.

### SUMMARY OF THE INVENTION

[0016] An object of the present invention is to provide a hematological cancer profiling system. In accordance with one aspect of the present invention, there is provided a system for profiling a hematological cancer comprising at least ten polynucleotide probes, each of said probes being between about 15 and about 500 nucleotides in length and comprising a sequence corresponding to, or complementary to, an mRNA transcribed from a gene selected from the group of genes set forth in Table 1, wherein the level of expression of said gene is indicative of one or more features of said hematological cancer.

[0017] In accordance with another aspect of the present invention, there is provided a use of the system according to the present invention for the preparation of a nucleic acid array.

[0018] In accordance with another aspect of the present invention, there is provided a method of profiling a hematological cancer in a subject comprising: (a) providing one or more gene sets, each gene set comprising at least five genes selected from the genes set forth in Table 1, wherein the expression level of each gene in said one or more gene sets is indicative of a feature of a heinatological cancer; (b) determining the expression level of each gene in said one or more gene sets in a test sample obtained from said subject to provide an expression pattern profile, and (c) comparing said expression pattern profile with a reference expression pattern profile.

[0019] In accordance with another aspect of the present invention, there is provided a nucleic acid array comprising at least ten polynucleotide probes immobilized on a solid support, each of said probes being between about 15 and about 500 nucleotides in length and comprising a sequence corresponding to, or complementary to, an mRNA transcribed from a gene selected from the group of genes set forth in Table 1, wherein the level of expression of said gene is indicative of one or more features of said hematological cancer.

[0020] In accordance with another aspect of the present invention, there is provided a polynucleotide probe between about 15 and about 500 nucleotides in length and comprising a sequence corresponding to, or complementary to, an mRNA transcribed from a gene selected from the group of genes set forth in Table 1, wherein said probe comprises at least 15 consecutive nucleotides of a sequence as set forth in any one of SEQ ID NOs: 1-4530.

[0021] In accordance with another aspect of the present invention, there is provided a set of genes having an expression pattern representative of one or more features of a hematological cancer and comprising at least ten genes selected from: (a) at least ten genes selected from the genes set forth in Table 32; (b) at least ten genes selected from the genes set forth in Table 33; (c) at least ten genes selected from the genes set forth in Table 34; (d) at least ten genes selected from the genes set forth in Table 35; (e) at least ten genes selected from the genes set forth in Table 36; (f) at least ten genes selected from the genes set forth in Table 37; (g) at least ten genes selected from the genes set forth in Table 38; (h) at least ten genes selected from the genes set forth in Table 39; (i) at least ten genes selected from the genes set forth in Table 40, and (j) at least ten genes selected from the genes set forth in Table 41.

[0022] In accordance with another aspect of the present invention, there is provided a library of genes for profiling a hematological cancer, comprising the genes as set forth in Table 1.

[0023] In accordance with another aspect of the present invention, there is provided a computer-readable medium comprising one or more digitally-encoded expression pattern profiles representative of a set of genes according to any one of claims 38-41, each of said one or more expression pattern profiles being associated with one or more values wherein each of said one or more values is correlated with one of said one or more features of a hematological cancer.

### BRIEF DESCRIPTION OF FIGURES

[0024] FIG. 1 depicts a hierarchical clustering image of DLBCL signature genes in DLBCL samples versus control.

[0025] FIG. 2 depicts a hierarchical clustering image of FL signature genes in FL samples versus control.

[0026] FIG. 3 depicts a hierarchical clustering image of HL signature genes in HL samples versus control.

[0027] FIG. 4 depicts a hierarchical clustering image of MCL signature genes in MCL samples versus control.

[0028] FIG. 5 depicts a hierarchical clustering image of MZL signature genes in MZL samples versus control.

[0029] FIG. 6 depicts a hierarchical clustering image of SLL signature genes in SLL samples versus control.

[0030] FIG. 7 depicts a hierarchical clustering image of TCL signature genes in TCL samples versus control.

[0031] FIG. 8 depicts a hierarchical clustering image of lymphoma signature genes in 23 lymphoma samples versus control.

[0032] FIG. 9 depicts a hierarchical clustering image of leukemia signature genes in 4 leukemia samples versus control, and in 3 lymphoma samples.

[0033] FIG. 10 depicts a hierarchical clustering image of CLL signature genes in CLL samples versus control.

[0034] FIG. 11 depicts a hierarchical clustering image of AML signature genes in AML samples versus control.

[0035] FIG. 12 depicts a hierarchical clustering image of T-ALL signature genes in T-All samples versus control.

### DETAILED DESCRIPTION OF THE INVENTION

[0036] The present invention provides for a system for profiling hematological cancers. This system is based on the identification of a pool, or library, of genes that are characterized in that changes in expression of each of the genes can be correlated to one or more features of a hematological cancer. The library provided by the present invention can be used as a resource from which sets of “hematological cancer profiling” genes can be selected, each set representing a specific hematological cancer, for example, lymphoma or leukemia, or a type or sub-type of lymphoma or leukemia. The level of expression of each gene in a hematological cancer profiling set is indicative of one or more features of the hematological cancer represented by that set of genes. A combination of polynucleotide probes (a “hematological cancer profiling combination”) that comprises probes derived from the sequences of the genes of one or more hematological cancer profiling sets can then be prepared in order to profile one or more hematological cancers of interest. The system of the present invention thus provides the user with the flexibility of assessing the type(s) and/or feature(s) of the hematological cancer(s) that are of specific interest by selecting an appropriate hematological cancer profiling combination. In accordance with the present invention, the hematological cancer is selected from the group of: lymphoma and leukemia. Non-limiting examples of features of these cancers that can be assessed with system of the present invention include presence/absence, type, subtype, stage, progression, grade, aggressivity, outcome, survival and drug-responsiveness of hematological cancers, and the like.

[0037] The system of the present invention thus provides for sets of “hematological cancer profiling” genes selected from the library of genes. The system further provides for combinations of polynucleotide probes (“hematological cancer profiling combinations”) derived from the sequences of the genes of one or more hematological cancer profiling sets. A hematological cancer profiling combination thus comprises a plurality of probes that represent one or more hematological cancer profiling sets.

[0038] As indicated above, the system of the present invention allows for hematological cancer profiling combinations to be selected that are tailored to assess type(s) and/or feature(s) of the hematological cancer(s) of interest. The combination of probes thus may be tailored as desired such that it represents a single feature of a hematological cancer, multiple features of a hematological cancer, a single feature of multiple hematological cancers or multiple features of multiple hematological cancers.

[0039] The system provides for combinations of probes in solution, for example, for use in standard solution hybridization techniques or for use in quantitative PCR applications, as well as combinations of probes in an immobilised format, for example, as an array. The system can be used to analyse the expression pattern of genes belonging to one or more hematological cancer profiling (HCP) sets in a blood or biopsy sample from a patient having, suspected of having, or suspected of being at risk of developing, a hematological cancer. The resulting information allows the determination of one or more features of the hematological cancer such as those described above, and is, therefore, useful in disease prognosis, diagnosis, staging or grading, treatment management, monitoring of disease progression, predicting disease outcome or complications, and the like. The system can thus be used to profile a hematological cancer selected from the group of lymphoma and leukemia.

### DEFINITIONS

[0040] Unless defined otherwise, all technical and scientific terms used herein have the same meaning as commonly understood by one of ordinary skill in the art to which this invention belongs.

[0041] As used herein, the term “about” refers to a +/−10% variation from the nominal value. It is to be understood that such a variation is always included in any given value provided herein, whether or not it is specifically referred to.

[0042] The term “feature of a hematological cancer,” as used herein, refers to a characteristic of a hematological cancer. Such characteristics include fundamental aspects such as presence/absence of the disease in a subject and type of hematological cancer that are useful in diagnosis, as well as characteristics such as subtype, stage, progression, grade, aggressivity, drug-responsiveness, and the like, which are useful for disease management and patient care.

[0043] The term “gene,” as used herein, refers to a segment of nucleic acid that encodes an individual protein or RNA (also referred to as a “coding sequence” or “coding region”) together with associated regulatory regions such as promoters, operators, terminators and the like, that may be located upstream or downstream of the coding sequence.

[0044] The term “target gene,” as used herein, refers to a gene, the expression of which is to be detected using a polynucleotide probe of a hematological cancer profiling combination. In the context of the present invention, the target gene is a member of a hematological cancer profiling set.

[0045] The term “target mRNA,” as used herein, refers to an mRNA transcribed from a target gene.

[0046] The terms “oligonucleotide” and “polynucleotide” as used interchangeably in the present application refer to a polymer of greater than one nucleotide in length of ribonucleic acid (RNA), deoxyribonucleic acid (DNA), hybrid RNA/DNA, modified RNA or DNA, or RNA or DNA mimetics. The polynucleotides may be single- or double-stranded. The terms include polynucleotides composed of naturally-occurring nucleobases, sugars and covalent internucleoside (backbone) linkages as well as polynucleotides having non-naturally-occurring portions which function similarly. Such modified or substituted polynucleotides are well-known in the art and for the purposes of the present invention, are referred to as “analogues.”

[0047] The terms “probe” and “polynucleotide probe,” as used herein, refer to a polynucleotide that is capable of hybridizing to a target gene or target mRNA and includes polynucleotides in solution as well as those that are immobilized to a solid substrate, e.g. in an array.

[0048] By “gene expression pattern” or “expression pattern” is meant the level of gene expression of one or more target genes in a test sample, for example, genes of a hematological cancer profiling set as assessed by methods described herein. The “level of gene expression” refers to an absolute or relative amount of the transcription product of the target gene(s). Typically, the level of expression is measured relative to a reference sample and can be increased (up-regulated), decreased (down-regulated) or unchanged relative to the reference sample. The gene expression pattern can be measured at a single time point or over a period of time.

[0049] By “altered gene expression” is meant an increase or decrease in gene expression, as described below.

[0050] By “decrease in gene expression” is meant a lowering of the level of expression of a gene relative to a reference sample. Typically, the decrease is at least 10% relative to the reference. In one embodiment, a decrease in gene expression refers to a decrease in expression of the gene by at least 25%. In other embodiments, a decrease in gene expression refers to a decrease in expression of the gene by at least 30%, 40%, 50%, 60%, 70%, 80%, and 90%. Alternatively, a decrease in gene expression is at least 2-fold relative to the reference. In further embodiments, a decrease in gene expression refers to a decrease in expression of the gene by at least 3, 5, 7, or 10-fold relative to the reference.

[0051] By “increase in gene expression” is meant a raising of the level of expression of a gene relative to a reference sample. Typically, the increase is at least 10% relative to the reference. In one embodiment, an increase in gene expression refers to a decrease in expression of the gene by at least 25%. In other embodiments, an increase in gene expression refers to an increase in expression of the gene by at least 30%, 40%, 50%, 60%, 70%, 80%, and 90%. Alternatively, an increase in gene expression is at least 2-fold relative to the reference. In further embodiments, an increase in gene expression refers to an increase in expression of the gene by at least 3, 5, 7, or 10-fold relative to the reference.

[0052] The term “selectively hybridize,” as used herein, refers to the ability of a polynucleotide probe bind detectably and specifically to a target gene or nucleic acids derived therefrom. A polynucleotide probe selectively hybridizes to a target gene or nucleic acids under hybridization and wash conditions that minimize appreciable amounts of detectable binding to non-specific nucleic acids. High stringency conditions can be used to achieve selective hybridization conditions as known in the art and discussed herein. Typically, hybridization and washing conditions are performed at high stringency according to conventional hybridization procedures. Washing conditions are typically 1-3×SSC, 0.1-1% SDS, 50-70° C. with a change of wash solution after about 5-30 minutes.

[0053] The terms “corresponding to” or “corresponds to” indicates that a polynucleotide sequence is identical to all or a portion of a reference polynucleotide sequence. In contradistinction, the term “complementary to” is used herein to indicate that the polynucleotide sequence is identical to all or a portion of the complementary strand of a reference polynucleotide sequence. For illustration, the nucleotide sequence “TATAC” corresponds to a reference sequence “TATAC” and is complementary to a reference sequence “GTATA.”

[0054] The following terms are used herein to describe the sequence relationships between two or more polynucleotides: “reference sequence,” “window of comparison,” “sequence identity,” and “percent sequence identity.” A “reference sequence” is a defined sequence used as a basis for a sequence comparison; a reference sequence may be a subset of a larger sequence, for example, as a segment of a full-length cDNA, or gene sequence, or may comprise a complete cDNA, or gene sequence. Generally, a reference polynucleotide sequence is at least 20 nucleotides in length, and often at least 50 nucleotides in length.

[0055] A “window of comparison”, as used herein, refers to a conceptual segment of the reference sequence of at least 15 contiguous nucleotide positions over which a candidate sequence may be compared to the reference sequence and wherein the portion of the candidate sequence in the window of comparison may comprise additions or deletions (i.e. gaps) of 20 percent or less as compared to the reference sequence (which does not comprise additions or deletions) for optimal alignment of the two sequences. The present invention contemplates various lengths for the window of comparison, up to and including the full length of either the reference or candidate sequence. Optimal alignment of sequences for aligning a comparison window may be conducted using the local homology algorithm of Smith and Waterman (Adv. Appl. Math. (1981) 2:482), the homology alignment algorithm of Needleman and Wunsch (J. Mol. Biol. (1970) 48:443), the search for similarity method of Pearson and Lipman (Proc. Natl. Acad. Sci. (U.S.A.) (1988) 85:2444), using computerized implementations of these algorithms (such as GAP, BESTFIT, FASTA, and TFASTA in the Wisconsin Genetics Software Package Release 7.0, Genetics Computer Group, 573 Science Dr., Madison, Wis.), using publicly available computer software such as ALIGN or Megalign (DNASTAR), or by inspection. The best alignment (i.e. resulting in the highest percentage of identity over the comparison window) is then selected.

[0056] The term “sequence identity” means that two polynucleotide sequences are identical (i.e. on a nucleotide-by-nucleotide basis) over the window of comparison.

[0057] The term “percent (%) sequence identity,” as used herein with respect to a reference sequence is defined as the percentage of nucleotides in a candidate sequence that are identical with the nucleotides in the reference polynucleotide sequence over the window of comparison after optimal alignment of the sequences and introducing gaps, if necessary, to achieve the maximum percent sequence identity.

### 1. Hematological Cancer Profiling System

[0058] The system of the present invention is based on the identification of genes whose expression level is altered in a subject having a hematological cancer when compared to a reference subject and thus are indicative of a feature of the hematological cancer. For example, if the hematological cancer is lymphoma or leukemia, then depending on the feature in question, the reference subject can be, for example, a disease-free subject, a subject having a different type or subtype of lymphoma or leukemia, a subject undergoing a different therapeutic regimen, a subject with a different stage or grade of lymphoma or leukemia, a subject with an indolent form of disease, etc. Such genes are candidates for inclusion in one or more of the hematological cancer profiling (HCP) sets of the invention. Once genes have been selected for the HCP set(s), probes can be designed that specifically hybridise to the genes within the set. Combinations of the probes can then be formed that comprise probes representing those HCP sets that correlate with the hematological cancer(s) and/or feature(s) of the hematological cancer(s) that are of interest.

### 1.1 Hematological Cancer Profiling (HCP) Sets

[0059] An HCP set comprises one or more genes related to a hematological cancer, such as lymphoma or leukemia, i.e. a gene whose expression pattern is indicative of a selected lymphoma or leukemia, or a feature of a selected lymphoma or leukemia. For example, the level of expression of the gene can be indicative of the presence of a particular lymphoma or subtype thereof; the stage, grade, or aggressivity of a lymphoma or subtype thereof; the progression of a lymphoma or subtype thereof (for example, whether the lymphoma is localized, regional, or metastatic); the drug-responsiveness of a lymphoma or subtype thereof (for example, whether the lymphoma is drug-sensitive, drug-resistant or multi-drug resistant); the likelihood of transformation of one type of lymphoma to another (for example, transformation of FL into DLBCL); whether the lymphoma is refractory (i.e. not responsive to treatment); likelihood for the lymphoma to be fatal; mutational status of a lymphoma, and the like. Alternatively, the level of expression of the gene in an HCP set may reflect whether a subject affected by leukemia has a particular sub-type of leukemia, an increased risk of relapse, has an increased risk of developing secondary acute myeloid leukemia, prognosis for the subject with leukemia, selection of appropriate therapy for leukemia, the drug-responsiveness of leukemia or sub-type thereof, or the progression of the leukemia.

[0060] As is known in the art, some genes have been identified that correlate with more than one hematological cancer. For example, the expression level of a gene may be indicative of a feature of both lymphoma and leukemia. Moreover, some genes have been identified that correlate with more than one feature of a specific hematological cancer. For example, the expression level of a gene may be correlated to transformation of one type of lymphoma to another as well as being indicative of the subtype of that lymphoma. Such genes are also suitable for inclusion in the HCP sets of the present invention.

[0061] Each gene selected for inclusion in a particular HCP set relates to the same hematological cancer or type, or sub-type of a hematological cancer. As indicated above, hematological cancers contemplated by the present invention are selected from lymphoma or leukemia. Thus, for example, all of the genes of an HCP set may relate to lymphoma in general. Alternatively, exemplary types of lymphomas for which an HCP set can be formed include, but are not limited to, small lymphocytic lymphoma (SLL), B-cell prolymphocytic leukemia, lymphoplamacytic lymphoma, splenic marginal zone B-cell lymphoma, nodal marginal zone B-cell lymphoma, hairy cell leukemia, plasma cell myeloma/plasmacytoma, follicular lymphoma (FL), mantle cell lymphoma (MCL), Burkitt's lymphoma, diffuse large cell B-cell lymphoma (DLBCL), Hodgkin's lymphoma, lymphoblastic lymphoma, anaplastic large cell lymphoma (ALCL), cutaneous T-cell lymphoma, mycosis fungoids/Sézary's syndrome, peripheral T-cell lymphomas, angioimmunoblastic lymphoma, angiocentric lymphoma (nasal T-cell lymphoma), intestinal T-cell lymphoma, and adult T-cell lymphoma/leukemia. In one embodiment of the invention, genes selected for inclusion in an HCP set relate to a type of lymphoma selected from the group of: DLBCL, FL, CLL/SLL, MCL, HL, and ALCL.

[0062] Likewise, the present invention further contemplates that all of the genes of an HCP set may relate to leukemia in general. Alternatively, all of the genes of an HCP set may relate to a sub-type of leukemia. Exemplary sub-types of leukemias for which an HCP set can be designed include, but are not limited to B-cell chronic lymphocytic leukemia (CLL), chronic myelogenous leukemia (CML), acute lymphocytic leukemia (ALL), acute myelogenous leukemia (AML), T-ALL, MLL, BCR-ABL, TEL-AML1, E2A-PBX1, ALL with t(4;11). In one embodiment of the invention, genes selected for inclusion in an HCP set relate to a leukemia selected from the group of CLL, AML, and T-ALL.

[0063] With respect to CLL, a worker skilled in the art would understand that this sub-type of hematological cancer may be considered as a sub-type of lymphoma. Alternatively, it may be considered as a sub-type of leukemia.

[0064] Appropriate candidate genes for inclusion in the HCP sets can be selected from genes known in the art to be markers for a particular feature of a hematological cancer. Such genes can be identified from publicly available databases using a variety of “data mining” approaches known in the art. Alternatively, candidate genes can be identified by screening a nucleic acid library derived from a hematological cancer exhibiting a specific feature and selecting for genes whose expression level is modulated in this library when compared to a reference nucleic acid library. Methods of creating nucleic acid libraries are well known in the art (see, for example, Ausubel et al., (1997 & updates) Current Protocols in Molecular Biology, Wiley & Sons, New York).

[0065] In one embodiment of the present invention, candidate genes for inclusion in the HCP sets are identified by data mining. As is known in the art, publication and sequence databases can be mined using a variety of search strategies. For example, currently available scientific and medical publication databases such as Medline, Current Contents, OMIM (online Mendelian inheritance in man), various Biological and Chemical Abstracts, Journal indexes, and the like can be searched using term or key-word searches, or by author, title, or other relevant search parameters. Many such databases are publicly available, and strategies and procedures for identifying publications and their contents, for example, genes, other nucleotide sequences, descriptions, indications, expression pattern, etc, are well known to those skilled in the art. Numerous databases are available through the internet for free or by subscription, see, for example, the National Center Biotechnology Information (NCBI), Infotrieve, Thomson ISI, and Science Magazine (published by the AAAS) websites. Additional or alternative publication or citation databases are also available that provide identical or similar types of information, any of which can be employed in the context of the invention. These databases can be searched for publications describing altered gene expression between features of hematological cancers such as types of hematological cancers, for example types of lymphoma or leukemia, or subtypes of a specific hematological cancer, such as subtypes of lymphoma or leukemia.

[0066] For example, genes can initially be selected by consulting publications to identify genes that have been shown to be indicative of features of hematological cancers. The methods used to determine the expression level of these genes can include a variety of methods including PCR, Northern blots and microarray studies. Points can be awarded to potential candidate genes based on the number of independent researchers finding modulations within the hematological cancer as well as the number of different methods used to determine the expression level of these genes in the hematological cancer. The genes can then be ranked according to the number of points awarded, and those with the highest number of points may be selected as candidate genes. The number of candidate genes selected can vary depending on the number of features to be analyzed.

[0067] Gene sequences for genes of interest can be obtained from a variety of publicly available and proprietary sequence databases (including Genbank, dbEST, UniGene, and TIGR and SAGE databases) including sequences corresponding to expressed nucleotide sequences, such as expressed sequence tags (ESTs). For example, the Genbank™ website located at the NCBI website among others, can be readily accessed and searched via the internet. These and other sequence and clone database resources are currently available; however, a number of additional or alternative databases comprising gene sequences, EST sequences, clone repositories, PCR primer sequences, and the like corresponding to individual nucleotide sequences are also known and are suitable for the purposes of the invention.

[0068] While the above discussion relates primarily to “genomics” approaches, one skilled in the art will understand that numerous, analogous “proteomics” approaches are also suitable for selection of candidate genes for the HCP sets. For example, a differentially expressed protein product can, for example, be identified using Western analysis, two-dimensional gel analysis, chromatographic separation, mass spectrometric detection, protein-fusion reporter constructs, colorimetric assays, binding to a protein array, or by characterization of polysomal mRNA. The protein is further characterized and the nucleotide sequence encoding the protein is identified using standard techniques, e.g. by screening a cDNA library using a probe based on protein sequence information. Genes identified in this manner can also be included in the HCP set.

[0069] Representative, non-limiting examples of candidate genes for inclusion in HCP sets in accordance with the present invention are shown in Table 1.

TABLE 1
Candidate genes whose expression pattern is indicative of one or more
feature of a hematological cancer selected from the group of lymphoma
and leukemia

| GenBank | |
|---|---|
| Accession | Symbol |
| AA594161 | MYH11 |
| AA766908 | MME |
| AB014540 | SWAP70 |
| AF196185 | PARD3 |
| AI597616 | MRPL33 |
| AI634809 | ARID5B |
| AI672553 | AKAP12 |
| AI809213 | RGS13 |
| AK022231 | STAT1 |
| AK022293 | CTSD |
| AK055652 | C3orf6 |
| AL080130 | FLJ14001 |
| AL833316 | MIR |
| AW291384 | STS-1 |
| BE897089 | ZNF91 |
| BG993697 | SMYD3 |
| BI769730 | HLA-DRB1 |
| BQ632574 | RASA1 |
| BX504817 | SFRS7 |
| H53164 | IRF8 |
| H57732 | TGFBR2 |
| L29376 | 3.8-1 |
| M80899 | AHNAK |
| NM_000038 | APC |
| NM_000043 | FAS |
| NM_000061 | BTK |
| NM_000075 | CDK4 |
| NM_000109 | DMD |
| NM_000189 | HK2 |
| NM_000237 | LPL |
| NM_000269 | NME1 |
| NM_000271 | NPC1 |
| NM_000295 | SERPINA1 |
| NM_000313 | PROS1 |
| NM_000397 | CYBB |
| NM_000405 | GM2A |
| NM_000424 | KRT5 |
| NM_000483 | APOC2 |
| NM_000576 | IL1B |
| NM_000579 | CCR5 |
| NM_000584 | IL8 |
| NM_000585 | IL15 |
| NM_000600 | IL6 |
| NM_000626 | CD79B |
| NM_000627 | LTBP1 |
| NM_000633 | BCL2 |
| NM_000655 | SELL |
| NM_000713 | BLVRB |
| NM_000785 | CYP27B1 |
| NM_000788 | DCK |
| NM_000853 | GSTT1 |
| NM_000877 | IL1R1 |
| NM_000917 | P4HA1 |
| NM_000927 | ABCB1 |
| NM_001067 | TOP2A |
| NM_001068 | TOP2B |
| NM_001110 | ADAM10 |
| NM_001154 | ANXA5 |
| NM_001166 | BIRC2 |
| NM_001196 | BID |
| NM_001230 | CASP10 |
| NM_001238 | CCNE1 |
| NM_001242 | TNFRSF7 |
| NM_001254 | CDC6 |
| NM_001350 | DAXX |
| NM_001425 | EMP3 |
| NM_001552 | IGFBP4 |
| NM_001558 | IL10RA |
| NM_001618 | PARP1 |
| NM_001621 | AHR |
| NM_001647 | APOD |
| NM_001663 | ARF6 |
| NM_001706 | BCL6 |
| NM_001760 | CCND3 |
| NM_001762 | CCT6A |
| NM_001770 | CD19 |
| NM_001771 | CD22 |
| NM_001779 | CD58 |
| NM_001781 | CD69 |
| NM_001782 | CD72 |
| NM_001826 | CKS1B |
| NM_001827 | CKS2 |
| NM_001831 | CLU |
| NM_001852 | COL9A2 |
| NM_001853 | COL9A3 |
| NM_001877 | CR2 |
| NM_001888 | CRYM |
| NM_001894 | CSNK1E |
| NM_001951 | E2F5 |
| NM_001967 | EIF4A2 |
| NM_002002 | FCER2 |
| NM_002051 | GATA3 |
| NM_002095 | GTF2E2 |
| NM_002101 | GYPC |
| NM_002105 | H2AFX |
| NM_002120 | HLA-DOB |
| NM_002122 | HLA-DQA1 |
| NM_002155 | HSPA6 |
| NM_002189 | IL15RA |
| NM_002211 | ITGB1 |
| NM_002217 | ITIH3 |
| NM_002250 | KCNN4 |
| NM_002305 | LGALS1 |
| NM_002350 | LYN |
| NM_002358 | MAD2L1 |
| NM_002426 | MMP12 |
| NM_002467 | MYC |
| NM_002526 | NT5E |
| NM_002567 | PBP |
| NM_002646 | PIK3C2B |
| NM_002661 | PLCG2 |
| NM_002692 | POLE2 |
| NM_002738 | PRKCB1 |
| NM_002752 | MAPK9 |
| NM_002832 | PTPN7 |
| NM_002838 | PTPRC |
| NM_002891 | RASGRF1 |
| NM_002892 | ARID4A |
| NM_002943 | RORA |
| NM_002966 | S100A10 |
| NM_002967 | SAFB |
| NM_003037 | SLAMF1 |
| NM_003088 | FSCN1 |
| NM_003177 | SYK |
| NM_003217 | TEGT |
| NM_003226 | TFF3 |
| NM_003243 | TGFBR3 |
| NM_003254 | TIMP1 |
| NM_003290 | TPM4 |
| NM_003299 | TRA1 |
| NM_003332 | TYROBP |
| NM_003362 | UNG |
| NM_003451 | ZNF177 |
| NM_003648 | DGKD |
| NM_003656 | CAMK1 |
| NM_003810 | TNFSF10 |
| NM_003875 | GMPS |
| NM_003959 | HIP1R |
| NM_004049 | BCL2A1 |
| NM_004073 | PLK3 |
| NM_004091 | E2F2 |
| NM_004117 | FKBP5 |
| NM_004126 | GNG11 |
| NM_004184 | WARS |
| NM_004271 | LY86 |
| NM_004289 | NFE2L3 |
| NM_004322 | BAD |
| NM_004354 | CCNG2 |
| NM_004356 | CD81 |
| NM_004358 | CDC25B |
| NM_004422 | DVL2 |
| NM_004445 | EPHB6 |
| NM_004510 | SP110 |
| NM_004529 | MLLT3 |
| NM_004556 | NFKBIE |
| NM_004577 | PSPH |
| NM_004619 | TRAF5 |
| NM_004635 | MAPKAPK3 |
| NM_004737 | LARGE |
| NM_004844 | SH3BP5 |
| NM_004851 | NAPSA |
| NM_004951 | EBI2 |
| NM_005013 | NUCB2 |
| NM_005077 | TLE1 |
| NM_005127 | CLECSF2 |
| NM_005211 | CSF1R |
| NM_005213 | CSTA |
| NM_005214 | CTLA4 |
| NM_005271 | GLUD1 |
| NM_005292 | GPR18 |
| NM_005347 | HSPA5 |
| NM_005348 | HSPCA |
| NM_005415 | SLC20A1 |
| NM_005449 | TOSO |
| NM_005461 | MAFB |
| NM_005531 | IFI16 |
| NM_005582 | LY64 |
| NM_005601 | NKG7 |
| NM_005606 | LGMN |
| NM_005610 | RBBP4 |
| NM_005623 | CCL8 |
| NM_005638 | SYBL1 |
| NM_005652 | TERF2 |
| NM_005658 | TRAF1 |
| NM_005856 | RAMP3 |
| NM_005935 | MLLT2 |
| NM_005950 | MT1G |
| NM_005951 | MT1H |
| NM_006006 | ZBTB16 |
| NM_006014 | DXS9879E |
| NM_006115 | PRAME |
| NM_006162 | NFATC1 |
| NM_006164 | NFE2L2 |
| NM_006195 | PBX3 |
| NM_006218 | PIK3CA |
| NM_006254 | PRKCD |
| NM_006257 | PRKCQ |
| NM_006274 | CCL19 |
| NM_006317 | BASP1 |
| NM_006332 | IFI30 |
| NM_006475 | POSTN |
| NM_006498 | LGALS2 |
| NM_006558 | KHDRBS3 |
| NM_006620 | HBS1L |
| NM_006644 | HSPH1 |
| NM_006734 | HIVEP2 |
| NM_006761 | YWHAE |
| NM_006763 | BTG2 |
| NM_006841 | SLC38A3 |
| NM_006889 | CD86 |
| NM_006892 | DNMT3B |
| NM_006986 | MAGED1 |
| NM_007311 | BZRP |
| NM_007360 | KLRK1 |
| NM_007361 | NID2 |
| NM_012203 | GRHPR |
| NM_012448 | STAT5B |
| NM_012452 | TNFRSF13B |
| NM_013230 | CD24 |
| NM_014246 | CELSR1 |
| NM_014257 | CD209L |
| NM_014338 | PISD |
| NM_014456 | PDCD4 |
| NM_014686 | KIAA0355 |
| NM_014762 | DHCR24 |
| NM_015187 | KIAA0746 |
| NM_015641 | TES |
| NM_015866 | PRDM2 |
| NM_016076 | PNAS-4 |
| NM_016081 | KIAA0992 |
| NM_016187 | BIN2 |
| NM_016336 | UBE2J1 |
| NM_016628 | WAC |
| NM_017530 | LOC55565 |
| NM_017784 | OSBPL10 |
| NM_017935 | BANK1 |
| NM_017955 | CDCA4 |
| NM_018442 | IQWD1 |
| NM_018842 | BAIAP2L1 |
| NM_020151 | STARD7 |
| NM_020199 | C5orf15 |
| NM_020529 | NFKBIA |
| NM_020992 | PDLIM1 |
| NM_021813 | BACH2 |
| NM_021822 | APOBEC3G |
| NM_021950 | MS4A1 |
| NM_021966 | TCL1A |
| NM_022552 | DNMT3A |
| NM_023037 | 13CDNA73 |
| NM_024708 | ASB7 |
| NM_025113 | C13orf18 |
| NM_025216 | WNT10A |
| NM_030666 | SERPINB1 |
| NM_030764 | SPAP1 |
| NM_030775 | WNT5B |
| NM_031305 | ARHGAP24 |
| NM_031942 | CDCA7 |
| NM_032991 | CASP3 |
| NM_033208 | TIGD7 |
| NM_033274 | ADAM19 |
| NM_057735 | CCNE2 |
| NM_078467 | CDKN1A |
| NM_079421 | CDKN2D |
| NM_080593 | HIST1H2BK |
| NM_138340 | ABHD3 |
| NM_138379 | TIMD4 |
| NM_139207 | NAP1L1 |
| NM_139276 | STAT3 |
| NM_144646 | IGJ |
| NM_145804 | ABTB2 |
| NM_152785 | GCET2 |
| NM_172373 | ELF1 |
| NM_173624 | FLJ40504 |
| NM_175870 | LOC90925 |
| NM_177968 | PPM1B |
| NM_181443 | BTBD3 |
| NM_181838 | UBE2D2 |
| NM_182746 | MCM4 |
| NM_182776 | MCM7 |
| NM_198833 | SERPINB8 |
| NM_201593 | CACNB2 |
| R99527 | MGC39372 |
| T66903 | LOC54103 |
| U37028 | ITGAD |
| W56129 | SFRS9 |
| X58529 | IGHM |
| AA188785 | LOC286025 |
| AA347638 | BCR |
| AA601122 | SECTM1 |
| AA642467 | SLC2A14 |
| AA682722 | LARP |
| AA757235 | LOC399933 |
| AA765313 | FZD3 |
| AB002310 | HUWE1 |
| AB002333 | ZNF518 |
| AB024402 | ING1 |
| AB028952 | SYNPO |
| AB032991 | NDFIP2 |
| AF008915 | EVI5 |
| AF108138 | C15orf20 |
| AF116668 | LMO2 |
| AF143327 | FLJ32810 |
| AF200348 | D2S448 |
| AF245480 | MONDOA |
| AI075159 | SPTA1 |
| BU948323 | TCF4 |
| AI523104 | LILRB1 |
| AI675029 | C7 |
| AI694012 | PSMA5 |
| AI732248 | COL4A1 |
| AJ007509 | HNRPUL1 |
| AK022224 | ACTN1 |
| AK023928 | PSCD1 |
| AK024580 | NRP1 |
| AK025005 | MARCH1 |
| AK091853 | COL3A1 |
| AK126650 | CAPZB |
| AK127124 | ARHGEF4 |
| AK127132 | DRG1 |
| AK129940 | GNAI1 |
| AL049313 | CLIC5 |
| AL049327 | CBLB |
| AL049449 | GAB1 |
| AL050391 | CASP4 |
| AL137527 | LRCH3 |
| AL353942 | SEPT11 |
| AL833915 | TDRD9 |
| AL834278 | USP30 |
| AU252485 | MAP7 |
| AV650179 | PRG1 |
| AV686223 | KIAA1407 |
| AW014009 | MAP2K3 |
| AW190768 | SLC13A3 |
| AW292143 | GFAP |
| AW439398 | CCND1 |
| AW452039 | HRMT1L3 |
| AW615076 | LOC492304 |
| AW664012 | ALOX5 |
| AW967479 | CD38 |
| AW970654 | PHTF2 |
| BC028066 | NALP1 |
| BC034289 | LOC87769 |
| BC042366 | PCDH9 |
| BC045532 | LSM8 |
| BC050383 | TMPO |
| BC050602 | HIST1H2AC |
| BC058855 | VEGF |
| BE147267 | ECE1 |
| BE549606 | BZW1 |
| BE798965 | LAMC1 |
| BE927772 | SFRS3 |
| BF055235 | RIPK1 |
| BF513638 | WNT3 |
| BF848289 | CSDA |
| BG682263 | HDAC3 |
| BG683220 | PMS2 |
| BG747999 | MT1L |
| BI493513 | PHF8 |
| BI559738 | GPR56 |
| BM709325 | BCL7A |
| BM711190 | MED28 |
| BM727177 | GOLT1B |
| BQ009245 | GPM6B |
| BQ021469 | AGPS |
| BQ215285 | LEF1 |
| BQ898221 | ITGA6 |
| BU929213 | SESN3 |
| BU954396 | RPL11 |
| BX095432 | CNTN5 |
| BX640908 | EVI1 |
| BX648339 | USP53 |
| BX648365 | SEPT7 |
| BX649193 | TKT |
| C05886 | ETV6 |
| D31762 | TRAM2 |
| D86967 | EDEM1 |
| H41942 | NPEPPS |
| M60028 | HLA-DQB1 |
| M77810 | GATA2 |
| N26272 | MSI2 |
| N28431 | COL6A1 |
| N41620 | WWP1 |
| N53163 | COL27A1 |
| N54946 | EWSR1 |
| N70000 | UBE3B |
| NM_000016 | ACADM |
| NM_000022 | ADA |
| NM_000024 | ADRB2 |
| NM_000033 | ABCD1 |
| NM_000062 | SERPING1 |
| NM_000089 | COL1A2 |
| NM_000099 | CST3 |
| NM_000110 | DPYD |
| NM_000118 | ENG |
| NM_000120 | EPHX1 |
| NM_000147 | FUCA1 |
| NM_000169 | GLA |
| NM_000182 | HADHA |
| NM_000194 | HPRT1 |
| NM_000214 | JAG1 |
| NM_000234 | LIG1 |
| NM_000239 | LYZ |
| NM_000246 | MHC2TA |
| NM_000249 | MLH1 |
| NM_000251 | MSH2 |
| NM_000277 | PAH |
| NM_000305 | PON2 |
| NM_000314 | PTEN |
| NM_000341 | SLC3A1 |
| NM_000361 | THBD |
| NM_000382 | ALDH3A2 |
| NM_000395 | CSF2RB |
| NM_000417 | IL2RA |
| NM_000418 | IL4R |
| NM_000435 | NOTCH3 |
| NM_000448 | RAG1 |
| NM_000484 | APP |
| NM_000485 | APRT |
| NM_000536 | RAG2 |
| NM_000545 | TCF1 |
| NM_000546 | TP53 |
| NM_000561 | GSTM1 |
| NM_000574 | DAF |
| NM_000578 | SLC11A1 |
| NM_000594 | TNF |
| NM_000598 | IGFBP3 |
| NM_000601 | HGF |
| NM_000604 | FGFR1 |
| NM_000610 | CD44 |
| NM_000628 | IL10RB |
| NM_000629 | IFNAR1 |
| NM_000640 | IL13RA2 |
| NM_000660 | TGFB1 |
| NM_000700 | ANXA1 |
| NM_000701 | ATP1A1 |
| NM_000717 | CA4 |
| NM_00729 | CCK |
| NM_000732 | CD3D |
| NM_000773 | CYP2E1 |
| NM_000778 | CYP4N11 |
| NM_000791 | DHFR |
| NM_000801 | FKBP1A |
| NM_000852 | GSTP1 |
| NM_000856 | GUCY1A3 |
| NM_000867 | HTR2B |
| NM_000878 | IL2RB |
| NM_000885 | ITGA4 |
| NM_000887 | ITGAX |
| NM_000905 | NPY |
| NM_000906 | NPR1 |
| NM_000953 | PTGDR |
| NM_000960 | PTGDR |
| NM_000964 | RARA |
| NM_000967 | RPL3 |
| NM_000968 | RPL4 |
| NM_000969 | RPL5 |
| NM_000970 | RPL6 |
| NM_000972 | RPL7A |
| NM_001001 | CD36 |
| 547 | |
| NM_001005 | RPS3 |
| NM_001009 | RPS5 |
| NM_001015 | RPS11 |
| NM_001019 | RPS15A |
| NM_001069 | TUBB2 |
| NM_001079 | ZAP70 |
| NM_001092 | ABR |
| NM_001130 | AES |
| NM_001150 | ANPEP |
| NM_001165 | BIRC3 |
| NM_001175 | ARHGDIB |
| NM_001178 | ARNTL |
| NM_001207 | BTF3 |
| NM_001211 | BUB1B |
| NM_001219 | CALU |
| NM_001226 | CASP6 |
| NM_001228 | CASP8 |
| NM_001229 | CASP9 |
| NM_001237 | CCNA2 |
| NM_001239 | CCNH |
| NM_001255 | CDC20 |
| NM_001256 | CDC27 |
| NM_001265 | CDX2 |
| NM_001266 | CES1 |
| NM_001273 | CHD4 |
| NM_001274 | CHEK1 |
| NM_001280 | CIRBP |
| NM_001295 | CCR1 |
| NM_001312 | CRIP2 |
| NM_001313 | CRMP1 |
| NM_001337 | CX3CR1 |
| NM_001344 | DAD1 |
| NM_001345 | DGKA |
| NM_001398 | ECH1 |
| NM_001404 | EEF1G |
| NM_001428 | ENO1 |
| NM_001436 | FBL |
| NM_001441 | FAAH |
| NM_001456 | FLNA |
| NM_001459 | FLT3LG |
| NM_001462 | FPRL1 |
| NM_001489 | NR6A1 |
| NM_001513 | GSTZ1 |
| NM_001515 | GTF2H2 |
| NM_001540 | HSPB1 |
| NM_001560 | IL13RA1 |
| NM_001607 | ACAA1 |
| NM_001630 | ANXA8 |
| NM_001640 | APEH |
| NM_001654 | ARAF |
| NM_001664 | RHOA |
| NM_001700 | AZU1 |
| NM_001712 | CEACAM1 |
| NM_001715 | BLK |
| NM_001716 | BLR1 |
| NM_001728 | BSG |
| NM_001734 | C1S |
| NM_001743 | CALM2 |
| NM_001747 | CAPG |
| NM_001752 | CAT |
| NM_001753 | CAV1 |
| NM_001759 | CCND2 |
| NM_001767 | CD2 |
| NM_001772 | CD33 |
| NM_001774 | CD37 |
| NM_001776 | ENTPD1 |
| NM_001783 | CD79A |
| NM_001786 | CDC2 |
| NM_001793 | CDH3 |
| NM_001794 | CDH4 |
| NM_001795 | CDH5 |
| NM_001798 | CDK2 |
| NM_001830 | CLCN4 |
| NM_001838 | CCR7 |
| NM_001839 | CNN3 |
| NM_001897 | CSPG4 |
| NM_001901 | CTGF |
| NM_001905 | CTPS |
| NM_001908 | CTSB |
| NM_001916 | CYC1 |
| NM_001923 | DDB1 |
| NM_001928 | DF |
| NM_001939 | DRP2 |
| NM_001941 | DSC3 |
| NM_001952 | E2F6 |
| NM_001964 | EGR1 |
| NM_001993 | F3 |
| NM_001999 | FBN2 |
| NM_002015 | FOXO1A |
| NM_002017 | FLI1 |
| NM_002023 | FMOD |
| NM_002033 | FUT4 |
| NM_002046 | GAPD |
| NM_002049 | GATA1 |
| NM_002064 | GLRX |
| NM_002065 | GLUL |
| NM_002067 | GNA11 |
| NM_002068 | GNA15 |
| NM_002076 | GNS |
| NM_002086 | GRB2 |
| NM_002090 | CXCL3 |
| NM_002094 | GSPT1 |
| NM_002102 | GYPE |
| NM_002107 | H3F3A |
| NM_002108 | HAL |
| NM_002110 | HCK |
| NM_002118 | HLA-DMB |
| NM_002121 | HLA-DPB1 |
| NM_002128 | HMGB1 |
| NM_002129 | HMGB2 |
| NM_002135 | NR4A1 |
| NM_002141 | HOXA4 |
| NM_002145 | HOXB2 |
| NM_002162 | ICAM3 |
| NM_002166 | ID2 |
| NM_002167 | ID3 |
| NM_002186 | IL9R |
| NM_002193 | INHBB |
| NM_002198 | IRF1 |
| NM_002199 | IRF2 |
| NM_002222 | ITPR1 |
| NM_002224 | ITPR3 |
| NM_002228 | JUN |
| NM_002229 | JUNB |
| NM_002230 | JUP |
| NM_002248 | KCNN1 |
| NM_002276 | KRT19 |
| NM_002295 | LAMR1 |
| NM_002312 | LIG4 |
| NM_002341 | LTB |
| NM_002349 | LY75 |
| NM_002351 | SH2D1A |
| NM_002353 | TACSTD2 |
| NM_002356 | MARCKS |
| NM_002379 | MATN1 |
| NM_002388 | MCM3 |
| NM_002390 | ADAM11 |
| NM_002392 | MDM2 |
| NM_002393 | MDM4 |
| NM_002398 | MEIS1 |
| NM_002412 | MGMT |
| NM_002414 | CD99 |
| NM_002415 | MIF |
| NM_002417 | MKI67 |
| NM_002419 | MAP3K11 |
| NM_002421 | MMP1 |
| NM_002422 | MMP3 |
| NM_002436 | MPP1 |
| NM_002441 | MSH5 |
| NM_002444 | MSN |
| NM_002447 | MST1R |
| NM_002460 | IRF4 |
| NM_002462 | MX1 |
| NM_002466 | MYBL2 |
| NM_002475 | MLC1SA |
| NM_002483 | CEACAM6 |
| NM_002512 | NME2 |
| NM_002514 | NOV |
| NM_002527 | NTF3 |
| NM_002530 | NTRK3 |
| NM_002572 | PAFAH1B2 |
| NM_002576 | PAK1 |
| NM_002585 | PBX1 |
| NM_002592 | PCNA |
| NM_002600 | PDE4B |
| NM_002608 | PDGFB |
| NM_002609 | PDGFRB |
| NM_002616 | PER1 |
| NM_002619 | PF4 |
| NM_002621 | PFC |
| NM_002648 | PIM1 |
| NM_002658 | PLAU |
| NM_002659 | PLAUR |
| NM_002687 | PNN |
| NM_002704 | PPBP |
| NM_002729 | HHEX |
| NM_002730 | PRKACA |
| NM_002744 | PRKCZ |
| NM_002753 | MAPK10 |
| NM_002758 | MAP2K6 |
| NM_002791 | PSMA6 |
| NM_002800 | PSMB9 |
| NM_002814 | PSMD10 |
| NM_002827 | PTPN1 |
| NM_002831 | PTPN6 |
| NM_002835 | PTPN12 |
| NM_002844 | PTPRK |
| NM_002856 | PVRL2 |
| NM_002868 | RAB5B |
| NM_002870 | RAB13 |
| NM_002880 | RAF1 |
| NM_002887 | RARS |
| NM_002893 | RBBP7 |
| NM_002901 | RCN1 |
| NM_002908 | REL |
| NM_002913 | RFC1 |
| NM_002934 | RNASE2 |
| NM_002935 | RNASE3 |
| NM_002936 | RNASEH1 |
| NM_002953 | RPS6KA1 |
| NM_002960 | S100A3 |
| NM_002961 | S100A4 |
| NM_002971 | SATB1 |
| NM_002972 | SBF1 |
| NM_002975 | CLEC11A |
| NM_002983 | CCL3 |
| NM_002984 | CCL4 |
| NM_002985 | CCL5 |
| NM_003002 | SDHD |
| NM_003005 | SELP |
| NM_003006 | SELPLG |
| NM_003009 | SEPW1 |
| NM_003025 | SH3GL1 |
| NM_003038 | SLC1A4 |
| NM_003039 | SLC2A5 |
| NM_003058 | SLC22A2 |
| NM_003072 | SMARCA4 |
| NM_003073 | SMARCB1 |
| NM_003100 | SNX2 |
| NM_003113 | SP100 |
| NM_003118 | SPARC |
| NM_003120 | SPI1 |
| NM_003121 | SPIB |
| NM_003123 | SPN |
| NM_003127 | SPTAN1 |
| NM_003128 | SPTBN1 |
| NM_003133 | SRP9 |
| NM_003159 | CDKL5 |
| NM_003189 | TAL1 |
| NM_003200 | TCF3 |
| NM_003222 | TFAP2C |
| NM_003225 | TFF1 |
| NM_003234 | TFRC |
| NM_003262 | TLOC1 |
| NM_003288 | TPD52L2 |
| NM_003302 | TRIP6 |
| NM_003311 | PHLDA2 |
| NM_003315 | DNAJC7 |
| NM_003318 | TTK |
| NM_003352 | SUMO1 |
| NM_003361 | UMOD |
| NM_003383 | VLDLR |
| NM_003390 | WEE1 |
| NM_003395 | WNT9A |
| NM_003403 | YY1 |
| NM_003415 | ZNF268 |
| NM_003425 | ZNF45 |
| NM_003427 | ZNF76 |
| NM_003453 | ZNF198 |
| NM_003467 | CXCR4 |
| NM_003480 | MEAP5 |
| NM_003549 | HYAL3 |
| NM_003582 | DYRK3 |
| NM_003627 | SLC43A1 |
| NM_003636 | KCNAB2 |
| NM_003645 | SLC27A2 |
| NM_003692 | TMEFF1 |
| NM_003701 | TNESF11 |
| NM_003707 | RUVBL1 |
| NM_003739 | AKR1C3 |
| NM_003746 | DNCL1 |
| NM_003753 | EIF3S7 |
| NM_003801 | GPAA1 |
| NM_003805 | CRADD |
| NM_003821 | RIPK2 |
| NM_003824 | FADD |
| NM_003842 | TNFRSF10B |
| NM_003852 | TIF1 |
| NM_003874 | CD84 |
| NM_003877 | SOCS2 |
| NM_003879 | CFLAR |
| NM_003884 | PCAF |
| NM_003900 | SQSTM1 |
| NM_003902 | FUBP1 |
| NM_003914 | CCNA1 |
| NM_003954 | MAP3K14 |
| NM_003955 | SOCS3 |
| NM_003974 | DOK2 |
| NM_003998 | NFKB1 |
| NM_004039 | ANXA2 |
| NM_004047 | ATP6V0B |
| NM_004064 | CDKN1B |
| NM_004067 | CHN2 |
| NM_004077 | CS |
| NM_004083 | DDIT3 |
| NM_004088 | DNTT |
| NM_004093 | EFNB2 |
| NM_004099 | STOM |
| NM_004104 | FASN |
| NM_004111 | FEN1 |
| NM_004119 | FLT3 |
| NM_004177 | STX3A |
| NM_004208 | PDCD8 |
| NM_004221 | NK4 |
| NM_004235 | KLF4 |
| NM_004310 | RHOH |
| NM_004313 | ARRB2 |
| NM_004320 | ATP2A1 |
| NM_004324 | BAX |
| NM_004335 | BST2 |
| NM_004336 | BUB1 |
| NM_004343 | CALR |
| NM_004355 | CD74 |
| NM_004374 | COX6C |
| NM_004380 | CREBBP |
| NM_004385 | CSPG2 |
| NM_004413 | DPEP1 |
| NM_004425 | ECM1 |
| NM_004430 | EGR3 |
| NM_004448 | ERBB2 |
| NM_004449 | ERG |
| NM_004454 | ETV5 |
| NM_004475 | FLOT2 |
| NM_004494 | HDGF |
| NM_004501 | HNRPU |
| NM_004508 | IDI1 |
| NM_004513 | IL16 |
| NM_004526 | MCM2 |
| NM_004530 | MMP2 |
| NM_004557 | NOTCH4 |
| NM_004583 | RAB5C |
| NM_004615 | TM4SF2 |
| NM_004624 | VIPR1 |
| NM_004633 | IL1R2 |
| NM_004642 | CDK2AP1 |
| NM_004688 | NMI |
| NM_004689 | MTA1 |
| NM_004706 | ARHGEF1 |
| NM_004725 | BUB3 |
| NM_004815 | PARG1 |
| NM_004827 | ABCG2 |
| NM_004867 | ITM2A |
| NM_004924 | ACTN4 |
| NM_004936 | CDKN2B |
| NM_004938 | DAPK1 |
| NM_004941 | DHX8 |
| NM_004972 | JAK2 |
| NM_004994 | MMP9 |
| NM_004997 | MYBPH |
| NM_005012 | ROR1 |
| NM_005080 | XBP1 |
| NM_005084 | PLA2G7 |
| NM_005085 | NUP214 |
| NM_005098 | MSC |
| NM_005104 | BRD2 |
| NM_005123 | NR1H4 |
| NM_005157 | ABL1 |
| NM_005161 | AGTRL1 |
| NM_005178 | BCL3 |
| NM_005187 | CBFA2T3 |
| NM_005192 | CDKN3 |
| NM_005197 | CHES1 |
| NM_005215 | DCC |
| NM_005225 | E2F1 |
| NM_005230 | ELK3 |
| NM_005239 | ETS2 |
| NM_005245 | FAT |
| NM_005246 | FER |
| NM_005248 | FGR |
| NM_005252 | FOS |
| NM_005263 | GFI1 |
| NM_005317 | GZMM |
| NM_005318 | H1F0 |
| NM_005334 | HCFC1 |
| NM_005335 | HCLS1 |
| NM_005339 | HIP2 |
| NM_005340 | HINT1 |
| NM_005356 | LCK |
| NM_005375 | MYB |
| NM_005385 | NKTR |
| NM_005424 | TIE1 |
| NM_005427 | TP73 |
| NM_005439 | MLF2 |
| NM_005494 | DNAJB6 |
| NM_005504 | BCAT1 |
| NM_005521 | TLX1 |
| NM_005529 | HSPG2 |
| NM_005533 | IFI35 |
| NM_005556 | KRT7 |
| NM_005563 | STMN1 |
| NM_005566 | LDHA |
| NM_005572 | LMNA |
| NM_005583 | LYL1 |
| NM_005589 | ALDH6A1 |
| NM_005608 | PTPRCAP |
| NM_005621 | S100A12 |
| NM_005651 | TDO2 |
| NM_005654 | NR2F1 |
| NM_005671 | D8S2298E |
| NM_005687 | FARSLB |
| NM_005730 | CTDSP2 |
| NM_005731 | ARPC2 |
| NM_005738 | ARL4A |
| NM_005761 | PLXNC1 |
| NM_005767 | P2RY5 |
| NM_005781 | TNK2 |
| NM_005794 | DHRS2 |
| NM_005808 | CTDSPL |
| NM_005809 | PRDX2 |
| NM_005826 | HNRPR |
| NM_005835 | SLC17A2 |
| NM_005845 | ABCC4 |
| NM_005870 | SAP18 |
| NM_005895 | GOLGA3 |
| NM_005900 | SMAD1 |
| NM_005902 | SMAD3 |
| NM_005907 | MAN1A1 |
| NM_005911 | MAT2A |
| NM_005923 | MAP3K5 |
| NM_005933 | MLL |
| NM_005936 | MLLT4 |
| NM_005944 | CD200 |
| NM_005954 | MT3 |
| NM_005956 | MTHFD1 |
| NM_005957 | MTHFR |
| NM_005965 | MYLK |
| NM_006005 | WFS1 |
| NM_006017 | PROM1 |
| NM_006038 | SPATA2 |
| NM_006060 | ZNFN1A1 |
| NM_006079 | CITED2 |
| NM_006082 | K-APHA-1 |
| NM_006084 | ISGF3G |
| NM_006098 | GNB2L1 |
| NM_006101 | KNTC2 |
| NM_006113 | VAV3 |
| NM_006120 | HLA-DMA |
| NM_006142 | SFN |
| NM_006152 | LRMP |
| NM_006184 | NUCB1 |
| NM_006185 | NUMA1 |
| NM_006187 | OAS3 |
| NM_006190 | ORC2L |
| NM_006191 | PA2G4 |
| NM_006196 | PCBP1 |
| NM_006209 | ENPP2 |
| NM_006216 | SERPINE2 |
| NM_006230 | POLD2 |
| NM_006231 | POLE |
| NM_006235 | POU2AF1 |
| NM_006255 | PRKCH |
| NM_006263 | PSME1 |
| NM_006268 | DPF2 |
| NM_006273 | CCL7 |
| NM_006286 | TFDP2 |
| NM_006299 | ZNF193 |
| NM_006301 | MAP3K12 |
| NM_006302 | GCS1 |
| NM_006325 | RAN |
| NM_006329 | FBLN5 |
| NM_006343 | MERTK |
| NM_006354 | TADA3L |
| NM_006355 | TRIM38 |
| NM_006362 | NXF1 |
| NM_006427 | SIVA |
| NM_006472 | TXNIP |
| NM_006495 | EVI2B |
| NM_006509 | RELB |
| NM_006522 | WNT6 |
| NM_006534 | NCOA3 |
| NM_006559 | KHDRBS1 |
| NM_006565 | CTCF |
| NM_006579 | EBP |
| NM_006591 | POLD3 |
| NM_006602 | TCFL5 |
| NM_006676 | USP20 |
| NM_006739 | MCM5 |
| NM_006747 | SIPA1 |
| NM_006748 | SLA |
| NM_006759 | UGP2 |
| NM_006762 | LAPTM5 |
| NM_006769 | LMO4 |
| NM_006803 | AP3M2 |
| NM_006820 | IFI44L |
| NM_006825 | CKAP4 |
| NM_006845 | KIF2C |
| NM_006857 | RY1 |
| NM_006875 | PIM2 |
| NM_006904 | PRKDC |
| NM_006910 | RBBP6 |
| NM_006931 | SLC2A3 |
| NM_006932 | SMTN |
| NM_006937 | SUMO2 |
| NM_006938 | SNRPD1 |
| NM_006963 | ZNF22 |
| NM_006981 | NR4A3 |
| NM_006994 | BTN3A3 |
| NM_007022 | CYB561D2 |
| NM_007063 | TBC1D8 |
| NM_007065 | CDC37 |
| NM_007079 | PTP4A3 |
| NM_007111 | TFDP1 |
| NM_007117 | TRH |
| NM_012092 | ICOS |
| NM_012120 | CD2AP |
| NM_012207 | HNRPH3 |
| NM_012223 | MYO1B |
| NM_012267 | HSPBP1 |
| NM_012317 | LDOC1 |
| NM_012323 | MAFF |
| NM_012334 | MYO10 |
| NM_012384 | GMEB2 |
| NM_012417 | PITPNC1 |
| NM_012423 | RPL13A |
| NM_013282 | UHRF1 |
| NM_013314 | BLNK |
| NM_013416 | NCF4 |
| NM_014005 | PCDHA6 |
| NM_014207 | CD5 |
| NM_014232 | VAMP2 |
| NM_014244 | ADAMTS2 |
| NM_014298 | QPRT |
| NM_014345 | ZNF318 |
| NM_014365 | HSPB8 |
| NM_014575 | SCHIP1 |
| NM_014595 | NT5C |
| NM_014614 | PSME4 |
| NM_014624 | S100A6 |
| NM_014667 | VGLL4 |
| NM_014707 | HDAC9 |
| NM_014724 | ZNF305 |
| NM_014734 | KIAA0247 |
| NM_014735 | PHF16 |
| NM_014780 | CUL7 |
| NM_014792 | KIAA0125 |
| NM_014824 | FCHSD2 |
| NM_014890 | DOC1 |
| NM_014899 | RHOBTB3 |
| NM_014914 | CENTG2 |
| NM_015050 | KIAA0082 |
| NM_015069 | ZNE423 |
| NM_015099 | CAMTA2 |
| NM_015147 | KIAA0582 |
| NM_015149 | RGL1 |
| NM_015158 | ANKRD15 |
| NM_015166 | MLC1 |
| NM_015196 | KIAA0922 |
| NM_015210 | KIAA0802 |
| NM_015261 | KIAA0056 |
| NM_015335 | THRAP2 |
| NM_015436 | RCHY1 |
| NM_015458 | MTMR9 |
| NM_015474 | SAMHD1 |
| NM_015528 | RNF167 |
| NM_015568 | PPP1R16B |
| NM_015570 | AUTS2 |
| NM_015636 | ELF2B4 |
| NM_015670 | SENP3 |
| NM_015710 | GLTSCR2 |
| NM_015833 | ADARB1 |
| NM_015855 | WIT-1 |
| NM_015869 | PPARG |
| NM_015965 | GRIM19 |
| NM_016041 | DERL2 |
| NM_016091 | EIF3S6IP |
| NM_016184 | CLECSF6 |
| NM_016195 | MPHOSPH1 |
| NM_016221 | DCTN4 |
| NM_016308 | UMP-CMPK |
| NM_016343 | CENPF |
| NM_016570 | PTX1 |
| NM_016734 | PAX5 |
| NM_017437 | CPSF2 |
| NM_017448 | LDHC |
| NM_017617 | NOTCH1 |
| NM_017771 | PXK |
| NM_017787 | C10orf26 |
| NM_017794 | KIAA1797 |
| NM_018136 | ASPM |
| NM_018209 | ARFGAP1 |
| NM_018248 | FLJ10858 |
| NM_018462 | C3orf10 |
| NM_018664 | SNFT |
| NM_018951 | HOXA10 |
| NM_019028 | ZDHHC13 |
| NM_019071 | ING3 |
| NM_019102 | HOXA5 |
| NM_019111 | HLA-DRA |
| NM_019841 | TRPV5 |
| NM_019846 | CCL28 |
| NM_019857 | CTPS2 |
| NM_020310 | MNT |
| NM_020368 | SAS10 |
| NM_020371 | AVEN |
| NM_020631 | KIAA0720 |
| NM_020657 | ZNF304 |
| NM_020841 | OSBPL8 |
| NM_020843 | ZNF291 |
| NM_020892 | DTX2 |
| NM_020944 | GBA2 |
| NM_020956 | PRX |
| NM_020998 | MST1 |
| NM_021019 | MYL6 |
| NM_021025 | TLX3 |
| NM_021038 | MBNL1 |
| NM_021071 | DO |
| NM_021103 | TMSB10 |
| NM_021111 | RECK |
| NM_021114 | SPINK2 |
| NM_021603 | FXYD2 |
| NM_021643 | TRIB2 |
| NM_021814 | ELOVL5 |
| NM_021906 | USP9X |
| NM_021949 | ATP2B3 |
| NM_021960 | MCL1 |
| NM_022067 | C14orf133 |
| NM_022127 | SLC28A3 |
| NM_022161 | BIRC7 |
| NM_022334 | ITGB1BP1 |
| NM_022366 | TFB2M |
| NM_022436 | ABCG5 |
| NM_022438 | MAL |
| NM_022469 | GREM2 |
| NM_022549 | FEZ1 |
| NM_022716 | PRRX1 |
| NM_024006 | VKORC1 |
| NM_024099 | MGC2477 |
| NM_024319 | C1orf35 |
| NM_024408 | NOTCH2 |
| NM_024424 | WT1 |
| NM_024713 | C15orf29 |
| NM_024728 | C7orf10 |
| NM_025263 | PRR3 |
| NM_030660 | ATXN3 |
| NM_030674 | SLC38A1 |
| NM_030915 | LBH |
| NM_030926 | ITM2C |
| NM_030935 | THG-1 |
| NM_031243 | HNRPA2B1 |
| NM_031423 | CDCA1 |
| NM_031966 | CCNB1 |
| NM_032121 | DKFZp564K142 |
| NM_033238 | PML |
| NM_033512 | TSPYL5 |
| NM_033554 | HLA-DPA1 |
| NM_033642 | FGF13 |
| NM_057168 | WNT16 |
| NM_058195 | CDKN2A |
| NM_080284 | ABCA6 |
| NM_080700 | TREX2 |
| NM_130439 | MXI1 |
| NM_133259 | LRPPRC |
| NM_133378 | TTN |
| NM_138714 | NFAT5 |
| NM_144578 | C14orf32 |
| NM_144628 | TBC1D20 |
| NM_145698 | ACBD5 |
| NM_145867 | LTC4S |
| NM_147180 | PPP3R2 |
| NM_152739 | HOXA9 |
| NM_152788 | EB-1 |
| NM_152827 | SNX3 |
| NM_152890 | COL24A1 |
| NM_156038 | CSF3R |
| NM_172020 | POM121 |
| NM_173156 | C1orf16 |
| NM_173216 | SIAT1 |
| NM_173609 | C15orf21 |
| NM_173852 | KRTCAP2 |
| NM_175739 | SERPINA9 |
| NM_175744 | RHOC |
| NM_178586 | PPP2R5C |
| NM_181311 | TAZ |
| NM_181336 | LEMD2 |
| NM_181339 | IL24 |
| NM_181430 | FOXK2 |
| NM_181493 | ITPA |
| NM_181702 | GEM |
| NM_182729 | TXNRD1 |
| NM_182810 | ATF4 |
| NM_183395 | CIAS1 |
| NM_198232 | RNASE1 |
| NM_198400 | NEDD4 |
| NM_199335 | FYB |
| NM_199423 | WWP2 |
| NM_201592 | GPM6A |
| NM_201632 | TCF7 |
| NM_201998 | SF1 |
| NM_212474 | FN1 |
| R14777 | CYFIP2 |
| R56397 | PIK3C3 |
| R59027 | GRP58 |
| R72151 | GNL3 |
| R79128 | MAP3K1 |
| R86893 | C6orf110 |
| T07281 | NRIP1 |
| T28925 | ITGAL |
| U60115 | FHL1 |
| U79271 | AKT3 |
| W04885 | MYL4 |
| X66087 | MYBL1 |
| AK024272 | |
| AK025231 | IGLC2 |
| AL080190 | |
| BU618233 | |
| NM_001353.4 | AKR1C1 |

[0070] Accordingly, one embodiment of the present invention provides for a library of candidate genes suitable for profiling hematological cancers. In a further embodiment, the library of candidate genes comprises the genes set forth in Table 1. The library provides a resource from which genes appropriate for inclusion in a HCP sets can be selected.

[0071] Once candidate genes have been identified, an HCP set is formed by selecting those genes relating to the hematological cancer of interest that are indicative of features of the hematological cancer that are to be investigated. If more than one hematological cancer is to be investigated, or more than one sub-type of a hematological cancer is to be investigated, then different HCP sets can be formed containing genes that are indicative of the feature(s) of interest. For example if lymphoma and leukemia are to be investigated, then different HCP sets can be created, each one relating to a sub-type of lymphoma or a sub-type of leukemia and containing genes that are indicative of the feature(s) of interest.

[0072] It will be readily apparent that some genes are suitable for inclusion in more than one HCP set. For example, a gene that allows two lymphomas to be distinguished, such as DLBCL and FL, would be suitable for inclusion in an HCP set relating to DLBCL as well as an HCP set relating to FL. Alternatively, a gene that allows two leukemias to be distinguished, for example CLL and AML, would be suitable for inclusion in an HCP set relating to CLL as well as an HCP set relating to AML. Examples of genes that may be included in more than one HCP set are: AKR1C1, MAL (T-cell differentiation protein), and TIMP1.

[0073] The HCP set can comprise between one and about 2000 genes, depending on the number of features of the lymphoma the set is intended to represent. When the set comprises more than one gene, each gene of the set can relate to a different feature of the hematological cancer, or multiple genes within the HCP set can relate to the same feature. Thus, the HCP set can comprise genes that are indicative of one feature of a hematological cancer, genes that are indicative of more than one feature of a hematological cancer, or combinations thereof.

[0074] In one embodiment, the HCP set comprises at least 5 genes. In another embodiment, the HCP set comprises at least 10 genes. In a further embodiment, the HCP set comprises at least 15 genes. In other embodiments, the HCP set comprises at least 20, at least 25, at least 30, at least 35, and at least 40 genes. As indicated above, the HCP set typically comprises less than 2000 genes. In one embodiment of the present invention, therefore, the HCP set comprises between about 5 and about 2000 genes. In another embodiment, the HCP set comprises between about 5 and about 1500 genes. In a further embodiment, the HCP set comprises between about 5 and about 1000 genes. In other embodiments, the HCP set comprises between about 5 and about 750 genes, between about 5 and about 500 genes, between about 5 and about 400 genes, and between about 5 and about 300 genes. In other embodiments, the HCP set comprises between about 10 and about 1500 genes, between about 15 and about 1000 genes, between about 20 and about 750 genes, between about 25 and about 500 genes, between about 30 and about 400 genes, between about 30 and about 300 genes, and between about 30 and about 250 genes.

[0075] As indicated above, the HCP set is representative of at least one feature of a hematological cancer. In one embodiment of the present invention, the HCP set is representative of two or more features of a specific hematological cancer. In another embodiment, the HCP set is representative of between one and 20 features of a specific hematological cancer. In a further embodiment, the HCP set is representative of between 2 and 20 features of a specific hematological cancer. In yet another embodiment, the HCP set is representative of between 3 and 20 features of a specific hematological cancer. In other embodiments, the HCP set is representative of between one and 18, between one and 16, between one and 14 features, and between one and 12 features of a specific hematological cancer.

[0076] In one embodiment of the present invention, genes for inclusion in the HCP sets are selected from the genes set forth in Table 1. Representative, non-limiting examples of HCP sets are provided in Tables 2-19 below. Additional HCP sets representing other hematological cancers, types or sub-types of hematological cancers, or one or more features thereof, can be readily formed by the skilled worker having reference to the genes set forth in Table 1.

[0077] The present invention contemplates that these HCP sets can be used as the basis for forming expanded HCP sets that include additional genes to those listed for each set in the Tables below as well as reduced HCP sets from which some, or most, of the genes have been removed. One skilled in the art will also appreciate that combinations of the genes listed in Tables 2-19 below can be used to form additional HCP sets, the genes being selected based on the hematological cancer and features thereof to be investigated. Thus, HCP sets can be formed by combining one or more genes selected from one of the HCP sets provided in Tables 2-19 with one or more genes selected from at least one of the other HCP sets provided in Tables 2-19. All such sets are considered to be within the scope of the invention.

TABLE 2
An HCP set specific for lymphoma, according to one embodiment of the
invention:

| Accession | Symbol |
|---|---|
| AA594161.1 | MYH11 |
| AA766908.1 | MME |
| AB014540.1 | SWAP70 |
| AF196185.1 | PARD3 |
| AI597616.1 | MRPL33 |
| AI634809.1 | ARID5B |
| AI672553.1 | AKAP12 |
| AI809213.1 | RGS13 |
| AK022231.1 | STAT1 |
| AK022293.1 | CTSD |
| AK055652.1 | C3orf6 |
| AL080130.1 | FLJ14001 |
| AL833316.1 | MIR |
| AW271958.1 | TYMS |
| AW291384.1 | STS-1 |
| BE897089.1 | ZNF91 |
| BG993697.1 | SMYD3 |
| BI769730.1 | HLA-DRB1 |
| BQ632574.1 | RASA1 |
| BX504817.1 | SFRS7 |
| H53164.1 | IRF8 |
| H57732.1 | TGFBR2 |
| L29376.1 | 3.8-1 |
| M80899.1 | MGC5395 |
| NM_000038.2 | APC |
| NM_000043.3 | FAS |
| NM_000061.1 | BTK |
| NM_000075.2 | CDK4 |
| NM_000109.2 | DMD |
| NM_000189.4 | HK2 |
| NM_000237.1 | LPL |
| NM_000269.2 | NME1 |
| NM_000271.1 | NPC1 |
| NM_000295.3 | SERPINA1 |
| NM_000313.1 | PROS1 |
| NM_000397.2 | CYBB |
| NM_000405.3 | GM2A |
| NM_000424.2 | KRT5 |
| NM_000483.3 | APOC2 |
| NM_000576.2 | IL1B |
| NM_000579.1 | CCR5 |
| NM_000584.2 | IL8 |
| NM_000585.2 | IL15 |
| NM_000600.1 | IL6 |
| NM_000626.1 | CD79B |
| NM_000627.2 | LTBP1 |
| NM_000633.1 | BCL2 |
| NM_000655.2 | SELL |
| NM_000713.1 | BLVRB |
| NM_000785.2 | CYP27B1 |
| NM_000788.1 | DCK |
| NM_000853.1 | GSTT1 |
| NM_000873.2 | ICAM2 |
| NM_000877.2 | IL1R1 |
| NM_000917.1 | P4HA1 |
| NM_000927.3 | ABCB1 |
| NM_001067.2 | TOP2A |
| NM_001068.2 | TOP2B |
| NM_001110.1 | ADAM10 |
| NM_001154.2 | ANXA5 |
| NM_001166.3 | BIRC2 |
| NM_001196.2 | BID |
| NM_001197.3 | BIK |
| NM_001230.3 | CASP10 |
| NM_001238.1 | CCNE1 |
| NM_001242.3 | TNFRSF7 |
| NM_001254.2 | CDC6 |
| NM_001350.2 | DAXX |
| NM_001353.4 | AKR1C1 |
| NM_001425.1 | EMP3 |
| NM_001552.1 | IGFBP4 |
| NM_001558.2 | IL10RA |
| NM_001618.2 | PARP1 |
| NM_001621.2 | AHR |
| NM_001647.1 | APOD |
| NM_001663.2 | ARF6 |
| NM_001706.2 | BCL6 |
| NM_001760.2 | CCND3 |
| NM_001762.2 | CCT6A |
| NM_001770.3 | CD19 |
| NM_001771.1 | CD22 |
| NM_001779.1 | CD58 |
| NM_001781.1 | CD69 |
| NM_001782.1 | CD72 |
| NM_001826.1 | CKS1B |
| NM_001827.1 | CKS2 |
| NM_001831.2 | CLU |
| NM_001852.3 | COL9A2 |
| NM_001853.2 | COL9A3 |
| NM_001877.2 | CR2 |
| NM_001888.1 | CRYM |
| NM_001894.4 | CSNK1E |
| NM_001951.2 | E2F5 |
| NM_001967.2 | EIF4A2 |
| NM_002002.3 | FCER2 |
| NM_002051.2 | GATA3 |
| NM_002095.3 | GTF2E2 |
| NM_002101.3 | GYPC |
| NM_002105.1 | H2AFX |
| NM_002120.2 | HLA-DOB |
| NM_002122.2 | HLA-DQA1 |
| NM_002155.3 | HSPA6 |
| NM_002189.2 | IL15RA |
| NM_002211.2 | ITGB1 |
| NM_002217.1 | ITIH3 |
| NM_002250.2 | KCNN4 |
| NM_002305.2 | LGALS1 |
| NM_002306.1 | LGALS3 |
| NM_002350.1 | LYN |
| NM_002358.2 | MAD2L1 |
| NM_002426.1 | MMP12 |
| NM_002467.2 | MYC |
| NM_002526.1 | NT5E |
| NM_002567.2 | PBP |
| NM_002646.2 | PIK3C2B |
| NM_002661.1 | PLCG2 |
| NM_002692.2 | POLE2 |
| NM_002738.5 | PRKCB1 |
| NM_002752.3 | MAPK9 |
| NM_002832.2 | PTPN7 |
| NM_002838.2 | PTPRC |
| NM_002891.3 | RASGRF1 |
| NM_002892.2 | ARID4A |
| NM_002943.2 | RORA |
| NM_002966.1 | S100A10 |
| NM_002967.2 | SAFB |
| NM_003037.1 | SLAMF1 |
| NM_003088.2 | FSCN1 |
| NM_003177.3 | SYK |
| NM_003217.1 | TEGT |
| NM_003226.2 | TFF3 |
| NM_003243.1 | TGFBR3 |
| NM_003254.1 | TIMP1 |
| NM_003290.1 | TPM4 |
| NM_003299.1 | TRA1 |
| NM_003332.2 | TYROBP |
| NM_003362.2 | UNG |
| NM_003451.1 | ZNF177 |
| NM_003648.2 | DGKD |
| NM_003656.3 | CAMK1 |
| NM_003810.2 | TNFSF10 |
| NM_003875.1 | GMPS |
| NM_003915.2 | RBM12 |
| NM_003959.1 | HIP1R |
| NM_004049.2 | BCL2A1 |
| NM_004073.2 | PLK3 |
| NM_004091.2 | E2F2 |
| NM_004117.2 | FKBP5 |
| NM_004125.2 | GNG10 |
| NM_004126.2 | GNG11 |
| NM_004184.3 | WARS |
| NM_004271.1 | LY86 |
| NM_004289.5 | NFE2L3 |
| NM_004322.2 | BAD |
| NM_004354.1 | CCNG2 |
| NM_004356.2 | CD81 |
| NM_004358.3 | CDC25B |
| NM_004422.2 | DVL2 |
| NM_004445.1 | EPHB6 |
| NM_004460.2 | FAP |
| NM_004510.2 | SP110 |
| NM_004529.1 | MLLT3 |
| NM_004556.1 | NFKBIE |
| NM_004577.3 | PSPH |
| NM_004619.2 | TRAF5 |
| NM_004635.3 | MAPKAPK3 |
| NM_004737.2 | LARGE |
| NM_004844.1 | SH3BP5 |
| NM_004851.1 | NAPSA |
| NM_004951.2 | EBI2 |
| NM_005013.1 | NUCB2 |
| NM_005077.3 | TLE1 |
| NM_005127.2 | CLECSF2 |
| NM_005211.2 | CSF1R |
| NM_005213.2 | CSTA |
| NM_005214.2 | CTLA4 |
| NM_005271.1 | GLUD1 |
| NM_005292.2 | GPR18 |
| NM_005347.2 | HSPA5 |
| NM_005348.2 | HSPCA |
| NM_005415.3 | SLC20A1 |
| NM_005449.3 | TOSO |
| NM_005461.3 | MAFB |
| NM_005531.1 | IFI16 |
| NM_005582.1 | LY64 |
| NM_005601.3 | NKG7 |
| NM_005606.3 | LGMN |
| NM_005610.1 | RBBP4 |
| NM_005623.2 | CCL8 |
| NM_005638.3 | SYBL1 |
| NM_005652.2 | TERF2 |
| NM_005658.2 | TRAF1 |
| NM_005856.1 | RAMP3 |
| NM_005935.1 | MLLT2 |
| NM_005950.1 | MT1G |
| NM_005951.1 | MT1H |
| NM_006006.3 | ZBTB16 |
| NM_006014.2 | DXS9879E |
| NM_006115.3 | PRAME |
| NM_006162.3 | NFATC1 |
| NM_006164.2 | NFE2L2 |
| NM_006195.2 | PBX3 |
| NM_006218.1 | PIK3CA |
| NM_006254.3 | PRKCD |
| NM_006257.2 | PRKCQ |
| NM_006274.2 | CCL19 |
| NM_006317.3 | BASP1 |
| NM_006332.3 | IFI30 |
| NM_006475.1 | POSTN |
| NM_006498.1 | LGALS2 |
| NM_006558.1 | KHDRBS3 |
| NM_006620.2 | HBS1L |
| NM_006644.2 | HSPH1 |
| NM_006734.2 | HIVEP2 |
| NM_006761.3 | YWHAE |
| NM_006763.2 | BTG2 |
| NM_006841.3 | SLC38A3 |
| NM_006889.2 | CD86 |
| NM_006892.3 | DNMT3B |
| NM_006986.2 | MAGED1 |
| NM_007311.2 | BZRP |
| NM_007360.1 | KLRK1 |
| NM_007361.2 | NID2 |
| NM_012203.1 | GRHPR |
| NM_012448.3 | STAT5B |
| NM_012452.2 | TNFRSF13B |
| NM_013230.1 | CD24 |
| NM_014246.1 | CELSR1 |
| NM_014257.3 | CD209L |
| NM_014338.3 | PISD |
| NM_014456.3 | PDCD4 |
| NM_014686.2 | KIAA0355 |
| NM_014762.1 | DHCR24 |
| NM_015187.1 | KIAA0746 |
| NM_015641.2 | TES |
| NM_015866.2 | PRDM2 |
| NM_016076.2 | PNAS-4 |
| NM_016081.2 | KIAA0992 |
| NM_016187.1 | BIN2 |
| NM_016336.2 | UBE2J1 |
| NM_016628.2 | WAC |
| NM_017530.1 | LOC55565 |
| NM_017784.3 | OSBPL10 |
| NM_017935.2 | BANK1 |
| NM_017955.2 | CDCA4 |
| NM_018442.1 | IQWD1 |
| NM_018842.3 | BAIAP2L1 |
| NM_020151.2 | STARD7 |
| NM_020199.1 | C5orf15 |
| NM_020529.1 | NFKBIA |
| NM_020992.2 | PDLIM1 |
| NM_021813.1 | BACH2 |
| NM_021822.1 | APOBEC3G |
| NM_021950.2 | MS4A1 |
| NM_021966.1 | TCL1A |
| NM_022552.3 | DNMT3A |
| NM_023037.1 | 13CDNA73 |
| NM_024708.2 | ASB7 |
| NM_025113.1 | C13orf18 |
| NM_025216.2 | WNT10A |
| NM_030666.2 | SERPINB1 |
| NM_030764.2 | SPAP1 |
| NM_030775.2 | WNT5B |
| NM_031305.1 | ARHGAP24 |
| NM_031942.3 | CDCA7 |
| NM_032991.1 | CASP3 |
| NM_033208.2 | TIGD7 |
| NM_033274.1 | ADAM19 |
| NM_057735.1 | CCNE2 |
| NM_078467.1 | CDKN1A |
| NM_079421.2 | CDKN2D |
| NM_080593.1 | HIST1H2BK |
| NM_080881.1 | DBN1 |
| NM_138340.3 | ABHD3 |
| NM_138379.1 | TIMD4 |
| NM_139207.1 | NAP1L1 |
| NM_139276.2 | STAT3 |
| NM_144646.2 | IGJ |
| NM_145804.1 | ABTB2 |
| NM_152785.2 | GCET2 |
| NM_172373.2 | ELF1 |
| NM_173624.1 | FLJ40504 |
| NM_175870.3 | LOC90925 |
| NM_177968.1 | PPM1B |
| NM_181443.1 | BTBD3 |
| NM_181838.1 | UBE2D2 |
| NM_182746.1 | MCM4 |
| NM_182776.1 | MCM7 |
| NM_198833.1 | SERPINB8 |
| NM_201593.1 | CACNB2 |
| R99527.1 | MGC39372 |
| T66903.1 | LOC54103 |
| U37028.1 | ITGAD |
| U90916.1 | SORL1 |
| W56129.1 | SFRS9 |
| X58529.1 | IGHM |

TABLE 3
An HCP set specific for leukemia, according to one embodiment of the
invention

| GenBank ™ | | |
|---|---|---|
| Accession No. | Name | Symbol |
| W04885.1 | Myosin, light polypeptide 4, alkali; atrial, embryonic | MYL4 |
| NM_013230.1 | CD24 antigen (small cell lung carcinoma cluster 4 antigen) | CD24 |
| NM_173624.1 | Hypothetical protein FLJ40504 | FLJ40504 |
| NM_002276.3 | Keratin 19 | KRT19 |
| NM_002102.2 | Glycophorin E | GYPE |
| BC058855.1 | Vascular endothelial growth factor | VEGF |
| NM_001353.4 | Aldo-keto reductase family 1, member C2 (dihydrodiol | AKR1C1 |
| | dehydrogenase 2; bile acid binding protein; 3-alpha | |
| | hydroxysteroid dehydrogenase, type III) | |
| NM_002358.2 | MAD2 mitotic arrest deficient-like 1 (yeast) | MAD2L1 |
| NM_018136.2 | Asp (abnormal spindle)-like, microcephaly associated | ASPM |
| | (Drosophila) | |
| NM_005192.2 | Cyclin-dependent kinase inhibitor 3 (CDK2-associated dual | CDKN3 |
| | specificity phosphatase) | |
| NM_001168.1 | Baculoviral IAP repeat-containing 5 (survivin) | BIRC5 |
| NM_006845.2 | Kinesin family member 2C | KIF2C |
| NM_031966.2 | Cyclin B1 | CCNB1 |
| NM_001255.1 | CDC20 cell division cycle 20 homolog (S. cerevisiae) | CDC20 |
| NM_001237.2 | Cyclin A2 | CCNA2 |
| NM_001067.2 | Topoisomerase (DNA) II alpha 170 kDa | TOP2A |
| NM_003234.1 | Transferrin receptor (p90, CD71) | TFRC |
| NM_006101.1 | Kinetochore associated 2 | KNTC2 |
| NM_003038.2 | Solute carrier family 1 (glutamate/neutral amino acid | SLC1A4 |
| | transporter), member 4 | |
| NM_018842.3 | BAI1-associated protein 2-like 1 | BAIAP2L1 |
| NM_006115.3 | Preferentially expressed antigen in melanoma | PRAME |
| NM_031942.3 | Cell division cycle associated 7 | CDCA7 |
| NM_031423.2 | Cell division cycle associated 1 | CDCA1 |
| NM_001786.2 | Cell division cycle 2, G1 to S and G2 to M | CDC2 |
| NM_001254.2 | CDC6 cell division cycle 6 homolog (S. cerevisiae) | CDC6 |
| NM_002692.2 | Polymerase (DNA directed), epsilon 2 (p59 subunit) | POLE2 |
| NM_005563.3 | Stathmin 1/oncoprotein 18 | STMN1 |
| NM_001274.2 | CHK1 checkpoint homolog (S. pombe) | CHEK1 |
| NM_004577.3 | Phosphoserine phosphatase | PSPH |
| NM_005951.1 | Metallothionein 1H | MT1H |
| NM_005950.1 | Metallothionein 1G | MT1G |
| NM_022438.1 | Mal, T-cell differentiation protein | MAL |
| NM_002051.2 | GATA binding protein 3 | GATA3 |
| NM_006748.1 | Src-like-adaptor | SLA |
| NM_005077.3 | Transducin-like enhancer of split 1 (E(sp1) homolog, | TLE1 |
| | Drosophila) | |
| BE927772.1 | Splicing factor, arginine/serine-rich 3 | SFRS3 |
| NM_004615.2 | Transmembrane 4 superfamily member 2 | TM4SF2 |
| NM_000536.1 | Recombination activating gene 2 | RAG2 |
| NM_004088.2 | Deoxynucleotidyltransferase, terminal | DNTT |
| NM_000700.1 | Annexin A1 | ANXA1 |
| NM_201632.1 | Transcription factor 7 (T-cell specific, HMG-box) | TCF7 |
| NM_000732.2 | CD3D antigen, delta polypeptide (TiT3 complex) | CD3D |
| NM_004221.3 | Interleukin 32 | NK4 |
| NM_005601.3 | Natural killer cell group 7 sequence | NKG7 |
| NM_002838.2 | Protein tyrosine phosphatase, receptor type, C | PTPRC |
| NM_003467.1 | Chemokine (C—X—C motif) receptor 4 | CXCR4 |
| NM_001767.2 | CD2 antigen (p50), sheep red blood cell receptor | CD2 |
| NM_005356.2 | Lymphocyte-specific protein tyrosine kinase | LCK |
| NM_006734.2 | Human immunodeficiency virus type I enhancer binding protein 2 | HIVEP2 |
| NM_002412.2 | O-6-methylguanine-DNA methyltransferase | MGMT |
| NM_001079.3 | Zeta-chain (TCR) associated protein kinase 70 kDa | ZAP70 |
| NM_005608.1 | Protein tyrosine phosphatase, receptor type, C-associated | PTPRCAP |
| | protein | |
| NM_002831.3 | Protein tyrosine phosphatase, non-receptor type 6 | PTPN6 |
| T28925.1 | Integrin, alpha L (antigen CD11A (p180), lymphocyte function- | ITGAL |
| | associated antigen 1; alpha polypeptide) | |
| NM_005531.1 | Interferon, gamma-inducible protein 16 | IFI16 |
| NM_012151.2 | Coagulation factor VIII-associated (intronic transcript) 1 | F8A1 |
| NM_000109.2 | Dystrophin (muscular dystrophy, Duchenne and Becker types) | DMD |
| AI672553.1 | A kinase (PRKA) anchor protein (gravin) 12 | AKAP12 |
| BU929213.1 | Sestrin 3 | SESN3 |
| AL049313.1 | Chloride intracellular channel 5 | CLIC5 |
| NM_000856.1 | Guanylate cyclase 1, soluble, alpha 3 | GUCY1A3 |
| NM_005965.3 | Myosin, light polypeptide kinase | MYLK |
| NM_000237.1 | Lipoprotein lipase | LPL |
| AI307786.1 | Transcription factor 4 | TCF4 |
| NM_000089.3 | Collagen, type I, alpha 2 | COL1A2 |
| NM_001839.2 | Calponin 3, acidic | CNN3 |
| NM_006209.2 | Ectonucleotide pyrophosphatase/phosphodiesterase 2 | ENPP2 |
| | (autotaxin) | |
| NM_000062.1 | Serine (or cysteine) proteinase inhibitor, clade G (C1 inhibitor), | SERPING1 |
| | member 1, (angioedema, hereditary) | |
| NM_002658.1 | Plasminogen activator, urokinase | PLAU |
| NM_212474.1 | Fibronectin 1 | FN1 |
| NM_001901.1 | Connective tissue growth factor | CTGF |
| NM_003302.1 | Thyroid hormone receptor interactor 6 | TRIP6 |
| NM_000305.1 | Paraoxonase 2 | PON2 |
| AK055652.1 | Chromosome 3 open reading frame 6 | C3orf6 |
| NM_003821.4 | Receptor-interacting serine-threonine kinase 2 | RIPK2 |
| BC050602.1 | histone 1, H2ac | HIST1H2AC |
| NM_002870.2 | RAB13, member RAS oncogene family | RAB13 |
| NM_007311.2 | Benzodiazapine receptor (peripheral) | BZRP |
| NM_030666.2 | Serine (or cysteine) proteinase inhibitor, clade B (ovalbumin), | SERPINB1 |
| | member 1 | |
| NM_003254.1 | Tissue inhibitor of metalloproteinase 1 (erythroid potentiating | TIMP1 |
| | activity, collagenase inhibitor) | |
| NM_198232.1 | Ribonuclease, RNase A family, 1 (pancreatic) | RNASE1 |
| NM_015149.2 | Ral guanine nucleotide dissociation stimulator-like 1 | RGL1 |
| NM_025113.1 | Chromosome 13 open reading frame 18 | C13orf18 |
| NM_021966.1 | T-cell leukemia/lymphoma 1A | TCL1A |
| NM_002002.3 | Fc fragment of IgE, low affinity II, receptor for (CD23A) | FCER2 |
| NM_002661.1 | Phospholipase C, gamma 2 (phosphatidylinositol-specific) | PLCG2 |
| AK022231.1 | Signal transducer and activator of transcription 1, 91 kDa | STAT1 |
| NM_006317.3 | Brain abundant, membrane attached signal protein 1 | BASP1 |
| NM_006120.2 | Major histocompatibility complex, class II, DM alpha | HLA-DMA |
| NM_001774.1 | CD37 antigen | CD37 |
| NM_144646.2 | Immunoglobulin J polypeptide, linker protein for | IGJ |
| | immunoglobulin alpha and mu polypeptides | |
| NM_003121.1 | Spi-B transcription factor (Spi-1/PU.1 related) | SPIB |
| NM_021950.2 | Membrane-spanning 4-domains, subfamily A, member 1 | MS4A1 |
| NM_001877.2 | Complement component (3d/Epstein Barr virus) receptor 2 | CR2 |
| NM_005658.2 | TNF receptor-associated factor 1 | TRAF1 |
| NM_004513.3 | Interleukin 16 (lymphocyte chemoattractant factor) | IL16 |
| NM_002341.1 | Lymphotoxin beta (TNF superfamily, member 3) | LTB |
| AI523104.1 | Leukocyte immunoglobulin-like receptor, subfamily B (with | LILRB1 |
| | TM and ITIM domains), member 1 | |
| NM_013416.2 | Neutrophil cytosolic factor 4, 40 kDa | NCF4 |
| NM_004355.1 | CD74 antigen (invariant polypeptide of major | CD74 |
| | histocompatibility complex, class II antigen-associated) | |
| NM_005213.2 | Cystatin A (stefin A) | CSTA |
| BC042366.1 | protocadherin 9 | PCDH9 |
| NM_001337.2 | Chemokine (C—X3—C motif) receptor 1 | CX3CR1 |
| NM_002619.1 | Platelet factor 4 (chemokine (C—X—C motif) ligand 4) | PF4 |
| NM_002704.2 | Pro-platelet basic protein (chemokine (C—X—C motif) ligand 7) | PPBP |
| NM_015570.1 | Autism susceptibility candidate 2 | AUTS2 |
| U90916.1 | Sortilin-related receptor, L(DLR class) A repeats-containing | SORL1 |
| NM_004049.2 | BCL2-related protein A1 | BCL2A1 |
| NM_015474.2 | SAM domain and HD domain 1 | SAMHD1 |
| NM_004951.2 | Epstein-Barr virus induced gene 2 (lymphocyte-specific G | EBI2 |
| | protein-coupled receptor) | |
| NM_003037.1 | Signaling lymphocytic activation molecule family member 1 | SLAMF1 |
| NM_156038.2 | Colony stimulating factor 3 receptor (granulocyte) | CSF3R |
| NM_005248.1 | Gardner-Rasheed feline sarcoma viral (v-fgr) oncogene | FGR |
| | homolog | |
| NM_016184.2 | C-type lectin domain family 4, member A | CLECSF6 |
| NM_001776.3 | Ectonucleoside triphosphate diphosphohydrolase 1 | ENTPD1 |
| NM_004851.1 | Napsin A aspartic peptidase | NAPSA |
| NM_000484.2 | Amyloid beta (A4) precursor protein (protease nexin-II, | APP |
| | Alzheimer disease) | |
| NM_000626.1 | CD79B antigen (immunoglobulin-associated beta) | CD79B |
| NM_001242.3 | Tumor necrosis factor receptor superfamily, member 7 | TNFRSF7 |
| NM_006820.1 | Interferon-induced protein 44-like | IFI44L |
| NM_021822.1 | Apolipoprotein B mRNA editing enzyme, catalytic polypeptide- | APOBEC3G |
| | like 3F | |
| NM_000061.1 | Bruton agammaglobulinemia tyrosine kinase | BTK |
| NM_002985.2 | Chemokine (C-C motif) ligand 5 | CCL5 |
| NM_001558.2 | Interleukin 10 receptor, alpha | IL10RA |
| NM_006254.3 | Protein kinase C, delta | PRKCD |
| NM_002306.1 | Lectin, galactoside-binding, soluble, 3 (galectin 3) | LGALS3 |
| NM_000610.3 | CD44 antigen (homing function and Indian blood group system) | CD44 |
| NM_004271.1 | Lymphocyte antigen 86 | LY86 |
| AB014540.1 | SWAP-70 protein | SWAP70 |
| NM_001165.3 | Baculoviral IAP repeat-containing 3 | BIRC3 |
| NM_006889.2 | CD86 antigen (CD28 antigen ligand 2, B7-2 antigen) | CD86 |
| NM_002110.2 | Hemopoietic cell kinase | HCK |
| NM_003810.2 | Tumor necrosis factor (ligand) superfamily, member 10 | TNFSF10 |
| T66903.1 | Hypothetical protein LOC54103 | LOC54103 |
| NM_005335.3 | Hematopoietic cell-specific Lyn substrate 1 | HCLS1 |
| NM_005767.3 | Purinergic receptor P2Y, G-protein coupled, 5 | P2RY5 |
| NM_007360.1 | Killer cell lectin-like receptor subfamily K, member 1 | KLRK1 |
| NM_006498.1 | Lectin, galactoside-binding, soluble, 2 (galectin 2) | LGALS2 |
| NM_000118.1 | Endoglin (Osler-Rendu-Weber syndrome 1) | ENG |
| AL050391.1 | Caspase 4, apoptosis-related cysteine protease | CASP4 |
| NM_005211.2 | Colony stimulating factor 1 receptor, formerly McDonough | CSF1R |
| | feline sarcoma viral (v-fms) oncogene homolog | |
| NM_030764.2 | SH2 domain containing phosphatase anchor protein 1 | SPAP1 |
| NM_001001547.1 | CD36 antigen (collagen type I receptor, thrombospondin | CD36 |
| | receptor) | |
| NM_005621.1 | S100 calcium binding protein A12 (calgranulin C) | S100A12 |
| NM_000295.3 | Serine (or cysteine) proteinase inhibitor, clade A (alpha-1 | SERPINA1 |
| | antiproteinase, antitrypsin), member 1 | |
| NM_005084.2 | Phospholipase A2, group VII (platelet-activating factor | PLA2G7 |
| | acetylhydrolase, plasma) | |
| NM_021038.3 | Muscleblind-like (Drosophila) | MBNL1 |
| NM_001553.1 | Insulin-like growth factor binding protein 7 | IGFBP7 |
| NM_006332.3 | Interferon, gamma-inducible protein 30 | IFI30 |
| NM_002305.2 | Lectin, galactoside-binding, soluble, 1 (galectin 1) | LGALS1 |
| NM_002961.2 | S100 calcium binding protein A4 (calcium protein, calvasculin, | S100A4 |
| | metastasin, murine placental homolog) | |
| NM_006472.1 | Thioredoxin interacting protein | TXNIP |
| NM_014624.2 | S100 calcium binding protein A6 (calcyclin) | S100A6 |
| NM_003332.2 | TYRO protein tyrosine kinase binding protein | TYROBP |
| NM_033554.2 | Major histocompatibility complex, class II, DP alpha 1 | HLA-DPA1 |
| NM_002121.4 | Major histocompatibility complex, class II, DP beta 1 | HLA-DPB1 |
| NM_019111.2 | Major histocompatibility complex, class II, DR alpha | HLA-DRA |

TABLE 4
An HCP set specific for ALCL, according to one embodiment of the
invention

| Feature | Accession | Symbol | Name | Notes | Level |
|---|---|---|---|---|---|
| ALCL | NM_001831 | CLU | Clusterin | Diagnostic | Up in |
| Signature | | | | Marker | ALCL |
| ALK+ | NM_000295 | SERPINA1 | serine (or cysteine) | Genes up | Up in |
| vs. ALK− | | | proteinase inhibitor, clade A | regulated in | ALK+ |
| (ALCL) | | | (aHCPha-1 antiproteinase, | ALK+ ALCL | ALCL vs |
| | | | antitrypsin), member 1 | | ALK− |
| ALK+ | NM_022743 | SMYD3 | SET and MYND domain | Genes up | Up in |
| vs. ALK− | | | containing 3 | regulated in | ALK+ |
| (ALCL) | | | | ALK+ ALCL | ALCL vs |
| | | | | | ALK− |
| ALK+ | NM_003217 | TEGT | testis enhanced gene | Genes up | Up in |
| vs. ALK− | | | transcript (BAX inhibitor 1) | regulated in | ALK+ |
| (ALCL) | | | | ALK+ ALCL | ALCL vs |
| | | | | | ALK− |
| ALK+ | NM_003352 | UBL1 | ubiquitin-like 1 (sentrin) | Genes up | Up in |
| vs. ALK− | | | | regulated in | ALK+ |
| (ALCL) | | | | ALK+ ALCL | ALCL vs |
| | | | | | ALK− |
| ALK+ | NM_004762 | PSCD1 | pleckstrin homology, Sec7 | Genes up | Up in |
| vs. ALK− | | | and coiled-coil domains | regulated in | ALK+ |
| (ALCL) | | | 1(cytohesin 1) | ALK+ ALCL | ALCL vs |
| | | | | | ALK− |
| ALK+ | NM_002444 | MSN | moesin | Genes up | Up in |
| vs. ALK− | | | | regulated in | ALK+ |
| (ALCL) | | | | ALK+ ALCL | ALCL vs |
| | | | | | ALK− |
| ALK+ | NM_006325 | RAN | RAN, member RAS | Genes up | Up in |
| vs. ALK− | | | oncogene family | regulated in | ALK+ |
| (ALCL) | | | | ALK+ ALCL | ALCL vs |
| | | | | | ALK− |
| ALK+ | NM_006579 | EBP | emopamil binding protein | Genes up | Up in |
| vs. ALK− | | | (sterol isomerase) | regulated in | ALK+ |
| (ALCL) | | | | ALK+ ALCL | ALCL vs |
| | | | | | ALK− |
| ALK+ | NM_032263 | DKFZp434B227 | hypothetical protein | Genes up | Up in |
| vs. ALK− | | | DKFZp434B227 | regulated in | ALK+ |
| (ALCL) | | | | ALK+ ALCL | ALCL vs |
| | | | | | ALK− |
| ALK+ | NM_014670 | BZW1 | basic leucine zipper and W2 | Genes up | Up in |
| vs. ALK− | | | domains 1 | regulated in | ALK+ |
| (ALCL) | | | | ALK+ ALCL | ALCL vs |
| | | | | | ALK− |
| ALK+ | NM_000877 | IL1R1 | interleukin 1 receptor, type I | Genes up | Up in |
| vs. ALK− | | | | regulated in | ALK+ |
| (ALCL) | | | | ALK+ ALCL | ALCL vs |
| | | | | | ALK− |
| ALK+ | NM_018209 | ARFGAP1 | ADP-ribosylation factor | Genes up | Up in |
| vs. ALK− | | | GTPase activating protein 1 | regulated in | ALK+ |
| (ALCL) | | | | ALK+ ALCL | ALCL vs |
| | | | | | ALK− |
| ALK+ | NM_001923 | DDB1 | damage-specific DNA | Genes up | Up in |
| vs. ALK− | | | binding protein 1, 127 kDa | regulated in | ALK+ |
| (ALCL) | | | | ALK+ ALCL | ALCL vs |
| | | | | | ALK− |
| ALK+ | NM_001618 | ADPRT | ADP-ribosyltransferase | Genes up | Up in |
| vs. ALK− | | | (NAD+; poly (ADP-ribose) | regulated in | ALK+ |
| (ALCL) | | | polymerase) | ALK+ ALCL | ALCL vs |
| | | | | | ALK− |
| ALK+ | NM_021960 | MCL1 | myeloid cell leukemia | Genes up | Up in |
| vs. ALK− | | | sequence 1 (BCL2-related) | regulated in | ALK+ |
| (ALCL) | | | | ALK+ ALCL | ALCL vs |
| | | | | | ALK− |
| ALK+ | NM_001165 | BIRC3 | baculoviral IAP repeat- | Genes up | Up in |
| vs. ALK− | | | containing 3 | regulated in | ALK+ |
| (ALCL) | | | | ALK+ ALCL | ALCL vs |
| | | | | | ALK− |
| ALK+ | NM_018462 | MDS027 | uncharacterized | Genes up | Up in |
| vs. ALK− | | | hematopoietic | regulated in | ALK+ |
| (ALCL) | | | stem/progenitor cells protein | ALK+ ALCL | ALCL vs |
| | | | MDS027 | | ALK− |
| ALK+ | AB032991 | NDFIP2 | Nedd4 family interacting | Genes up | Up in |
| vs. ALK− | | | protein 2 | regulated in | ALK+ |
| (ALCL) | | | | ALK+ ALCL | ALCL vs |
| | | | | | ALK− |
| ALK+ | NM_000417 | IL2RA | interleukin 2 receptor, | Genes up | Up in |
| vs. ALK− | | | aHCPha | regulated in | ALK+ |
| (ALCL) | | | | ALK+ ALCL | ALCL vs |
| | | | | | ALK− |
| ALK+ | NM_031966 | CCNB1 | cyclin B1 | Genes up | Up in |
| vs. ALK− | | | | regulated in | ALK+ |
| (ALCL) | | | | ALK+ ALCL | ALCL vs |
| | | | | | ALK− |
| ALK+ | NM_030674 | SLC38A1 | solute carrier family 38, | Genes up | Up in |
| vs. ALK− | | | member 1 | regulated in | ALK+ |
| (ALCL) | | | | ALK+ ALCL | ALCL vs |
| | | | | | ALK− |
| ALK+ | NM_022366 | TFB2M | transcription factor B2, | Genes up | Up in |
| vs. ALK− | | | mitochondrial | regulated in | ALK+ |
| (ALCL) | | | | ALK+ ALCL | ALCL vs |
| | | | | | ALK− |
| HL vs. | NM_002228 | JUN | v-jun sarcoma virus 17 | Differentially | Up only in |
| ALCL | | | oncogene homolog (avian) | regulated | HL |
| | | | | between ALCL | |
| | | | | and HL | |
| HL vs. | NM_002961 | S100A4 | S100 calcium binding | Differentially | Up only in |
| ALCL | | | protein A4 (calcium protein, | regulated | HL |
| | | | calvasculin, metastasin, | between ALCL | |
| | | | murine placental homolog) | and HL | |
| HL vs. | NM_005178 | BCL3 | B-cell CLL/lymphoma 3 | Diagnostic | Up only in |
| ALCL | | | | Marker | ALCL |
| HL vs. | NM_176783 | PSME1 | proteasome (prosome, | Differentially | Up only in |
| ALCL | | | macropain) activator subunit | regulated | ALCL |
| | | | 1 (PA28 aHCPha) | between ALCL | |
| | | | | and HL | |
| HL vs. | NM_000485 | APRT | adenine | Differentially | Up in Both |
| ALCL | | | phosphoribosyltransferase | regulated | HL and |
| | | | | between ALCL | ALCL |
| | | | | and HL | |
| HL vs. | NM_001728 | BSG | basigin (OK blood group) | Differentially | Up only in |
| ALCL | | | | regulated | ALCL |
| | | | | between ALCL | |
| | | | | and HL | |
| HL vs. | NM_006763 | BTG2 | BTG family member 2 | Differentially | Up in Both |
| ALCL | | | | regulated | HL and |
| | | | | between ALCL | ALCL |
| | | | | and HL | |
| HL vs. | NM_001743 | CALM2 | calmodulin 2 (phosphorylase | Differentially | Up in Both |
| ALCL | | | kinase, delta) | regulated | HL and |
| | | | | between ALCL | ALCL |
| | | | | and HL | |
| HL vs. | NM_002086 | GRB2 | growth factor receptor-bound | Differentially | Up only in |
| ALCL | | | protein 2 | regulated | HL |
| | | | | between ALCL | |
| | | | | and HL | |
| HL vs. | NM_005340 | HINT1 | histidine triad nucleotide | Differentially | Up only in |
| ALCL | | | binding protein 1 | regulated | ALCL |
| | | | | between ALCL | |
| | | | | and HL | |
| HL vs. | NM_006191 | PA2G4 | proliferation-associated 2G4, | Differentially | Up in Both |
| ALCL | | | 38 kDa | regulated | HL and |
| | | | | between ALCL | ALCL |
| | | | | and HL | |
| HL vs. | NM_030666 | SERPINB1 | seine (or cysteine) | Differentially | Up in Both |
| ALCL | | | proteinase inhibitor, clade B | regulated | HL and |
| | | | (ovalbumin), member 1 | between ALCL | ALCL |
| | | | | and HL | |
| HL vs. | NM_003955 | SOCS3 | suppressor of cytokine | Differentially | Up only in |
| ALCL | | | signaling 3 | regulated | ALCL |
| | | | | between ALCL | |
| | | | | and HL | |
| HL vs. | NM_003254 | TIMP1 | tissue inhibitor of | Genes unique | Disagreement: |
| ALCL | | | metalloproteinase 1 | to | Up in |
| | | | (erythroid potentiating | Reed/Sternberg | HL; Up |
| | | | activity, collagenase | cells; | only in |
| | | | inhibitor) | Differentially | ALCL; Up |
| | | | | regulated | in Fatal; |
| | | | | between ALCL | Down in |
| | | | | and HL; Genes | Cured |
| | | | | with prognostic | |
| | | | | value | |
| HL vs. | NM_033306 | CASP4 | caspase 4, apoptosis-related | Differentially | Up only in |
| ALCL | | | cysteine protease | regulated | ALCL |
| | | | | between ALCL | |
| | | | | and HL | |
| Signature; | NM_003254 | TIMP1 | tissue inhibitor of | Genes unique | Disagreement: |
| HL vs. | | | metalloproteinase 1 | to | Up in |
| ALCL; | | | (erythroid potentiating | Reed/Sternberg | HL; Up |
| Survival | | | activity, collagenase | cells; | only in |
| | | | inhibitor) | Differentially | ALCL; Up |
| | | | | regulated | in Fatal; |
| | | | | between ALCL | Down in |
| | | | | and HL; Genes | Cured |
| | | | | with prognostic | |
| | | | | value | |

TABLE 5
An HCP set specific for CLL/SLL, according to one embodiment of the invention

| Feature | Accession | Symbol | Name | Notes | Level |
|---|---|---|---|---|---|
| CLL/SLL | NM_020944 | GBA2 | glucosidase, beta (bile | | down in |
| vs MCL | | | acid) 2 | | MCL vs |
| | | | | | SLL (−5.1) |
| CLL/SLL | NM_003222 | TFAP2C | transcription factor AP- | | down in |
| | | | 2 gamma (activating | | CLL/SLL |
| | | | enhancer binding | | (−7.2) |
| | | | protein 2 gamma) | | |
| CLL/SLL | NM_019846 | CCL28 | chemokine (C-C motif) | | up in FL |
| vs FL | | | ligand 28 | | vs |
| | | | | | CLL/SLL |
| | | | | | (5.2) |
| CLL/SLL | NM_004827 | ABCG2 | ATP-binding cassette, | | down in |
| | | | sub-family G | | CLL/SLL |
| | | | (WHITE), member 2 | | (−7.2) |
| CLL/SLL | NM_001830 | CLCN4 | chloride channel 4 | | down in |
| vs MCL | | | | | MCL vs |
| | | | | | SLL (−4.9) |
| CLL vs. | NM_000633 | BCL2 | B-cell CLL/lymphoma 2 | CLL signature vs. | High in |
| DLBCL | | | | DLBCL | CLL |
| CLL/SLL | NM_001237 | CCNA2 | cyclin A2 | | Down in |
| | | | | | CLL/SLL |
| | | | | | (−5) |
| CLL vs. | NM_053056 | CCND1 | cyclin D1 | MCL, CLL | High in |
| MCL | | | (BCL1/PRAD1: | Signature&CLL | CLL |
| | | | parathyroid | Vs. MCL | |
| | | | adenomatosis 1) | Distinguisher | |
| MCL vs | NM_003651 | CSDA | cold shock domain | | down in |
| CLL/SLL | | | protein A | | MCL vs |
| | | | | | SLL (−4.4) |
| CLL vs. | NM_002390 | ADAM11 | a disintegrin and | Resting B-cell | High in |
| DLBCL | | | metalloproteinase | signature | CLL |
| | | | domain 11 | | |
| CLL vs. | NM_000698 | ALOX5 | arachidonate 5- | Resting B-cell | High in |
| DLBCL | | | lipoxygenase | signature | CLL |
| CLL vs. | NM_001706 | BCL6 | B-cell CLL/lymphoma | High in G-center | Low in |
| DLBCL | | | 6 (zinc finger protein | type DLBCL | CLL; |
| | | | 51) | | High in |
| | | | | | G-center |
| | | | | | DLBCL |
| CLL vs. | NM_001197 | BIK | BCL2-interacting killer | High in G-center | Low in |
| DLBCL | | | (apoptosis-inducing) | type DLBCL | CLL; |
| | | | | | High in |
| | | | | | G-center |
| | | | | | DLBCL |
| CLL vs. | NM_016187 | BIN2 | bridging integrator 2 | Resting B-cell | High in |
| DLBCL | | | | signature | CLL |
| CLL vs. | NM_014207 | CD5 | CD5 antigen (p56-62) | Hs.58685 | High in |
| DLBCL | | | | | CLL |
| CLL vs. | NM_001775 | CD38 | CD38 antigen (p45) | Hs.174944; | Low in |
| DLBCL | | | | Prognostically | CLL; |
| | | | | significant | High in |
| | | | | | G-center |
| | | | | | DLBCL |
| CLL/SLL | NM_002984 | CCL4 | chemokine (C-C motif) | | down in |
| | | | ligand 4 | | SLL (−8.7) |
| MCL vs | NM_002466 | MYBL2 | v-myb myeloblastosis | | up in |
| CLL/SLL | | | viral oncogene | | MCL vs |
| | | | homolog (avian)-like 2 | | SLL (5.1) |
| CLL/SLL | NM_025113 | C13orf18 | chromosome 13 open | | up in |
| | | | reading frame 18 | | SLL (4.8) |
| FL vs | NM_025113 | C13orf18 | chromosome 13 open | | down in |
| CLL/SLL | | | reading frame 18 | | FL vs |
| | | | | | SLL (−5.3) |
| MCL vs | NM_032873 | KIAA1959 | nm23-phosphorylated | | down in |
| CLL/SLL | | | unknown substrate | | MCL vs |
| | | | | | SLL (−5.3) |
| CLL/SLL | NM_000633 | BCL2 | B-cell CLL/lymphoma 2 | | Up in |
| | | | | | SLL (4.4) |
| MCL vs | NM_000418 | IL4R | interlekin 4 receptor | | down in |
| CLL/SLL | | | | | MCL vs |
| | | | | | SLL (−7.1) |
| CLL/SLL | NM_004630 | SF1 | splicing factor 1 | | down in |
| | | | | | CLL/SLL |
| | | | | | (−7) |
| CLL/SLL | AF509494 | KIAA1407 | KIAA1407 protein | | up in |
| | | | | | SLL (4.1) |
| CLL/SLL | NM_006565 | CTCF | CCCTC-binding factor | | down in |
| | | | (zinc finger protein) | | SLL (−4.1); |
| | | | | | up |
| | | | | | in FL vs |
| | | | | | SLL |
| | | | | | (10.2) |
| CLL/SLL | NM_000483 | APOC2 | apolipoprotein C-II | | up in |
| vs MCL | | | | | MCL vs |
| | | | | | SLL (5.6) |
| CLL/SLL | AB018263 | KIAA0720 | putative NFkB | | Up in |
| vs MCL | | | activating protein | | MCL vs |
| | | | | | SLL (4.3) |
| CLL/SLL | NM_003915 | CPNE1 | copine I | | up in |
| | | | | | SLL |
| | | | | | (7.1); up |
| | | | | | in FL vs |
| | | | | | SLL (−4.5) |
| CLL/SLL | NM_005248 | FGR | Gardner-Rasheed feline | | down in |
| | | | sarcoma viral (v-fgr) | | FL vs |
| | | | oncogene homolog | | SLL (−5.8); |
| | | | | | down in |
| | | | | | MCL vs |
| | | | | | SLL (−4.5) |
| CLL/SLL | NM_003480 | MFAP5 | microfibrillar | | up in |
| vs MCL | | | associated protein 5 | | MCL vs |
| | | | | | CLL/SLL |
| | | | | | (4.2) |
| CLL vs. | NM_005248 | FGR | Gardner-Rasheed feline | Resting B-cell | High in |
| DLBCL | | | sarcoma viral (v-fgr) | signature | CLL |
| | | | oncogene homolog | | |
| MCL vs | NM_023037 | 13CDNA73 | hypothetical protein | | MCL vs |
| CLL/SLL | | | CG003 | | SLL (−7.6) |
| Mutational | NM_002466 | MYBL2 | v-myb myeloblastosis | Ig mutation | Low in |
| Status | | | viral oncogene | indicator: Low in | Mutated |
| (CLL) | | | homolog (avian)-like 2 | mut | |
| CLL vs. | NM_005214 | CTLA4 | cytotoxic T- | CLL signature vs. | High in |
| DLBCL | | | lymphocyte-associated | DLBCL | CLL |
| | | | protein 4 | | |
| CLL vs. | NM_000075 | CDK4 | cyclin-dependent | MCL, CLL | High in |
| MCL | | | kinase 4 | Signature&CLL | CLL |
| | | | | Vs. MCL | |
| | | | | Distinguisher | |
| CLL vs. | NM_004064 | CDKN1B | cyclin-dependent | MCL, CLL | High in |
| MCL | | | kinase inhibitor 1B | Signature&CLL | CLL |
| | | | (p27, Kip1) | Vs. MCL | |
| | | | | Distinguisher | |
| CLL vs. | NM_004454 | ETV5 | ets variant gene 5 (ets- | RT-PCR analysis | High in |
| MCL | | | related molecule) | shows up | CLL |
| | | | | regulation in CLL | |
| CLL vs. | NM_002467 | MYC | v-myc | RT-PCR analysis | High in |
| MCL | | | myelocytomatosis viral | shows up | CLL |
| | | | oncogene homolog | regulation in CLL | |
| | | | (avian) | | |
| Mutational | NM_005100 | AKAP12 | A kinase (PRKA) | Ig mutation | Low in |
| Status | | | anchor protein (gravin) | indicator: Low in | Mutated |
| (CLL) | | | 12 | mut | |
| CLL vs. | NM_032663 | USP30 | ubiquitin specific | CLL signature vs. | High in |
| DLBCL | | | protease 30 | DLBCL | CLL |
| Mutational | NM_001826 | CKS1B | CDC28 protein kinase | Ig mutation | Low in |
| Status | | | regulatory subunit 1B | indicator: Low in | Mutated |
| (CLL) | | | | mut | |
| CLL vs. | NM_006472 | TXNIP | thioredoxin interacting | Resting B-cell | High in |
| DLBCL | | | protein | signature | CLL |
| Mutational | NM_006187 | OAS3 | 2′-5′-oligoadenylate | Ig mutation | Low in |
| Status | | | synthetase 3, 100 kDa | indicator: Low in | Mutated |
| (CLL) | | | | mut | |
| CLL/SLL | NM_002933 | RNASE1 | ribonuclease, RNase A | | down in |
| vs MCL | | | family, 1 (pancreatic) | | MCL vs |
| | | | | | SLL (−5.4) |
| CLL/SLL | NM_006820 | C1orf29 | chromosome 1 open | | down in |
| vs FL | | | reading frame 29 | | FL vs |
| | | | | | MCL (−4.3) |
| CLL/SLL | BC046632 | FLJ21195 | protein related to DAN | | up in FL |
| vs FL | | | and cerberus | | vs SLL |
| | | | | | (4.1) |
| CLL/SLL | NM_024713 | FLJ22557 | hypothetical protein | | up in |
| | | | FLJ22557 | | SLL |
| | | | | | (11.9) |
| CLL/SLL | NM_031305 | ARHGAP24 | Rho GTPase activating | | up in |
| | | | protein 24 | | SLL (4.4) |
| Mutational | NM_017935 | BANK1 | B-cell scaffold protein | Ig mutation | High in |
| Status | | | with ankyrin repeats 1 | indicator: high in | Mutated |
| (CLL) | | | | mut | |
| CLL vs. | XM_034274 | MYBL1 | v-myb myeloblastosis | High in G-center | Low in |
| DLBCL | | | viral oncogene | type DLBCL | CLL; |
| | | | homolog (avian)-like 1 | | High in |
| | | | | | G-center |
| | | | | | DLBCL |
| CLL/SLL | NM_014686 | KIAA0355 | KIAA0355 | | down in |
| vs FL | | | | | FL vs |
| | | | | | SLL (−4.5 ) |
| CLL vs. | NM_058176 | HDAC9 | histone deacetylase 9 | CLL signature vs. | High in |
| DLBCL | | | | DLBCL | CLL |
| CLL vs. | NM_006850 | IL24 | interleukin 24 | Resting B-cell | High in |
| DLBCL | | | | signature | CLL |
| CLL vs. | NM_000417 | IL2RA | interleukin 2 receptor, | CLL signature vs. | High in |
| DLBCL | | | aHCPha | DLBCL | CLL |
| CLL vs. | NM_000418 | IL4R | interleukin 4 receptor | Resting B-cell | High in |
| DLBCL | | | | signature | CLL |
| CLL vs. | NM_005574 | LMO2 | LIM domain only 2 | High in G-center | Low in |
| DLBCL | | | (rhombotin-like 1) | type DLBCL | CLL; |
| | | | | | High in |
| | | | | | G-center |
| | | | | | DLBCL |
| CLL vs. | NM_001760 | CCND3 | cyclin D3 | CLL Vs. MCL | High in |
| MCL | | | | Distinguisher | CLL |
| CLL vs. | NM_007289 | MME | membrane metallo- | High in G-center | Low in |
| DLBCL | | | endopeptidase (neutral | type DLBCL | CLL; |
| | | | endopeptidase, | | High in |
| | | | enkephalinase, | | G-center |
| | | | CALLA, CD10) | | DLBCL |
| CLL vs. | NM_006495 | EVI2B | ecotropic viral | Resting B-cell | High in |
| DLBCL | | | integration site 2B | signature | CLL |
| CLL vs. | NM_002738 | PRKCB1 | protein kinase C, beta 1 | Resting B-cell | High in |
| DLBCL | | | | signature | CLL |
| CLL vs. | NM_002835 | PTPN12 | protein tyrosine | CLL signature vs. | High in |
| DLBCL | | | phosphatase, non- | DLBCL | CLL |
| | | | receptor type 12 | | |
| CLL vs. | NM_002927 | RGS13 | regulator of G-protein | High in G-center | Low in |
| DLBCL | | | signalling 13 | type DLBCL | CLL; |
| | | | | | High in |
| | | | | | G-center |
| | | | | | DLBCL |
| CLL vs. | NM_003005 | SEHCP | selectin P (granule | CLL signature vs. | High in |
| DLBCL | | | membrane protein | DLBCL | CLL |
| | | | 140 kDa, antigen | | |
| | | | CD62) | | |
| CLL vs. | NM_005449 | TOSO | regulator of Fas- | Resting B-cell | High in |
| DLBCL | | | induced apoptosis | signature | CLL |
| CLL vs. | NM_133378 | TTN | titin | CLL signature vs. | High in |
| DLBCL | | | | DLBCL | CLL |
| CLL vs. | XM_042066 | MAP3K1 | mitogen-activated | Resting B-cell | High in |
| DLBCL | | | protein kinase kinase | signature | CLL |
| | | | kinase 1 | | |

TABLE 6
An HCP set specific for DLBCL, according to one embodiment of the
invention

| Feature | Accession | Symbol | Name | Notes | Level |
|---|---|---|---|---|---|
| CLL vs. | XM_042066 | MAP3K1 | mitogen-activated | Resting B-cell | High in CLL |
| DLBCL | | | protein kinase kinase | signature | |
| | | | kinase 1 | | |
| DLBCL Vs. | NM_006472 | TXNIP | thioredoxin interacting | Genes | Down in |
| FL | | | protein | specific to | DLBCL, Up in |
| | | | | either | FL |
| | | | | DLBCL or | |
| | | | | FL | |
| CLL vs. | NM_003005 | SEHCP | selectin P (granule | CLL | High in CLL |
| DLBCL | | | membrane protein | signature vs. | |
| | | | 140 kDa, antigen CD62) | DLBCL | |
| CLL vs. | NM_002927 | RGS13 | regulator of G-protein | High in G- | Low in CLL; |
| DLBCL | | | signalling 13 | center type | High in G- |
| | | | | DLBCL | center DLBCL |
| CLL vs. | NM_002835 | PTPN12 | protein tyrosine | CLL | High in CLL |
| DLBCL | | | phosphatase, non- | signature vs. | |
| | | | receptor type 12 | DLBCL | |
| CLL vs. | NM_002738 | PRKCB1 | protein kinase C, beta 1 | Resting B-cell | High in CLL |
| DLBCL | | | | signature | |
| CLL vs. | NM_133378 | TTN | titin | CLL | High in CLL |
| DLBCL | | | | signature vs. | |
| | | | | DLBCL | |
| CLL vs. | NM_007289 | MME | membrane metallo- | High in G- | Low in CLL; |
| DLBCL | | | endopeptidase (neutral | center type | High in G- |
| | | | endopeptidase, | DLBCL | center DLBCL |
| | | | enkephalinase, CALLA, | | |
| | | | CD10) | | |
| CLL vs. | NM_006472 | TXNIP | thioredoxin interacting | Resting B-cell | High in CLL |
| DLBCL | | | protein | signature | |
| CLL vs. | NM_005574 | LMO2 | LIM domain only 2 | High in G- | Low in CLL; |
| DLBCL | | | (rhombotin-like 1) | center type | High in G- |
| | | | | DLBCL | center DLBCL |
| CLL vs. | NM_000418 | IL4R | interleukin 4 receptor | Resting B-cell | High in CLL |
| DLBCL | | | | signature | |
| CLL vs. | NM_000417 | IL2RA | interleukin 2 receptor, | CLL | High in CLL |
| DLBCL | | | aHCPha | signature vs. | |
| | | | | DLBCL | |
| CLL vs. | NM_006850 | IL24 | interleukin 24 | Resting B-cell | High in CLL |
| DLBCL | | | | signature | |
| CLL vs. | NM_058176 | HDAC9 | histone deacetylase 9 | CLL | High in CLL |
| DLBCL | | | | signature vs. | |
| | | | | DLBCL | |
| CLL vs. | NM_005248 | FGR | Gardner-Rasheed feline | Resting B-cell | High in CLL |
| DLBCL | | | sarcoma viral (v-fgr) | signature | |
| | | | oncogene homolog | | |
| CLL vs. | XM_034274 | MYBL1 | v-myb myeloblastosis | High in G- | Low in CLL; |
| DLBCL | | | viral oncogene homolog | center type | High in G- |
| | | | (avian)-like 1 | DLBCL | center DLBCL |
| DLBCL Vs. | NM_006152 | LRMP | lymphoid-restricted | Shipp and | High in |
| FL; BCL6 | | | membrane protein | Alizadeh | DLBCL; ? |
| Translocation | | | | Common | |
| Partners | | | | Genes; | |
| | | | | Akasaka: | |
| | | | | Translocation | |
| | | | | partner of | |
| | | | | BCL6 but exp | |
| | | | | data not | |
| | | | | shown | |
| CLL vs. | NM_000633 | BCL2 | B-cell CLL/lymphoma 2 | CLL | High in CLL |
| DLBCL | | | | signature vs. | |
| | | | | DLBCL | |
| DLBCL Vs. | NM_005582 | LY64 | lymphocyte antigen 64 | Genes | Down in |
| FL | | | homolog, radioprotective | specific to | DLBCL, Up in |
| | | | 105 kDa (mouse) | either | FL |
| | | | | DLBCL or | |
| | | | | FL | |
| DLBCL Vs. | NM_006851 | GLIPR1 | GLI pathogenesis-related | Genes | Down in |
| FL | | | 1 (glioma) | specific to | DLBCL, Up in |
| | | | | either | FL |
| | | | | DLBCL or | |
| | | | | FL | |
| DLBCL Vs. | NM_001891 | CSN2 | casein beta | Genes | Down in |
| FL | | | | specific to | DLBCL, Up in |
| | | | | either | FL |
| | | | | DLBCL or | |
| | | | | FL | |
| DLBCL Vs. | NM_001781 | CD69 | CD69 antigen (p60, | Genes | Down in |
| FL | | | early T-cell activation | specific to | DLBCL, Up in |
| | | | antigen) | either | FL |
| | | | | DLBCL or | |
| | | | | FL | |
| CLL vs. | NM_005449 | TOSO | regulator of Fas-induced | Resting B-cell | High in CLL |
| DLBCL | | | apoptosis | signature | |
| DLBCL Vs. | NM_012203 | GRHPR | glyoxylate | Expression in | Up in |
| FL; BCL6 | | | reductase/hydroxypyruvate | FL to DLBCL | transformation |
| Translocation | | | reductase | transformation; | from FL to |
| Partners | | | | Translocation | DLBCL |
| | | | | partner of | |
| | | | | BCL6 but exp | |
| | | | | data not | |
| | | | | shown | |
| CLL vs. | NM_014207 | CD5 | CD5 antigen (p56-62) | Hs.58685 | High in CLL |
| DLBCL | | | | | |
| DLBCL Vs. | NM_004310 | ARHH | ras homolog gene | Genes | Down in |
| FL; BCL6 | | | family, member H | specific to | DLBCL, Up in |
| Translocation | | | | either | FL; ? |
| Partners | | | | DLBCL or | |
| | | | | FL; Shipp and | |
| | | | | Alizadeh | |
| | | | | Common | |
| | | | | Genes; | |
| | | | | Akasaka: | |
| | | | | Translocation | |
| | | | | partner of | |
| | | | | BCL6 but exp | |
| | | | | data not | |
| | | | | shown | |
| DLBCL Vs. | NM_002266 | KPNA2 | karyopherin aHCPha 2 | Genes | Up in |
| FL | | | (RAG cohort 1, importin | specific to | transformation |
| | | | aHCPha 1) | either | from FL to |
| | | | | DLBCL or | DLBCL |
| | | | | FL; | |
| | | | | Expression in | |
| | | | | FL to DLBCL | |
| | | | | transformation | |
| DLBCL Vs. | NM_007146 | ZNF161 | zinc finger protein 161 | Expression in | Up in FL |
| FL | | | | Fl vs. GC | |
| | | | | DLBCL | |
| DLBCL Vs. | NM_002228 | JUN | v-jun sarcoma virus 17 | Expression in | Up in FL |
| FL | | | oncogene homolog | Fl vs. GC | |
| | | | (avian) | DLBCL | |
| FL vs. | NM_000633 | BCL2 | B-cell CLL/lymphoma 2 | Genes | High in FL; |
| Burkitts; | | | | significantly | Up in FL |
| DLBCL Vs. | | | | deregulated; | |
| FL | | | | Genes up | |
| | | | | regulated in | |
| | | | | FL; | |
| | | | | Prognostically | |
| | | | | significant | |
| CLL vs. | NM_032663 | USP30 | ubiquitin specific | CLL | High in CLL |
| DLBCL | | | protease 30 | signature vs. | |
| | | | | DLBCL | |
| DLBCL Vs. | NM_002046 | GAPD | glyceraldehyde-3- | Genes | Up in |
| FL | | | phosphate | Correlated | transformation |
| | | | dehydrogenase | with Survival; | from FL to |
| | | | | Expression in | DLBCL |
| | | | | FL to DLBCL | |
| | | | | transformation | |
| DLBCL Vs. | NM_001197 | BIK | BCL2-interacting killer | Expression in | Down in FL |
| FL | | | (apoptosis-inducing) | Fl vs. GC | |
| | | | | DLBCL | |
| DLBCL Vs. | NM_002168 | IDH2 | isocitrate dehydrogenase | Genes | Up in DLBCL; |
| FL | | | 2 (NADP+), | specific to | Down in FL; |
| | | | mitochondrial | either | Up in |
| | | | | DLBCL or | transformation |
| | | | | FL; | from FL to |
| | | | | Expression in | DLBCL |
| | | | | FL to DLBCL | |
| | | | | transformation | |
| DLBCL Vs. | NM_004044 | ATIC | 5-aminoimidazole-4- | Genes | Up in DLBCL; |
| FL | | | carboxamide | specific to | Down in FL; |
| | | | ribonucleotide | either | Up in |
| | | | formyltransferase/IMP | DLBCL or | transformation |
| | | | cyclohydrolase | FL; | from FL to |
| | | | | Expression in | DLBCL |
| | | | | FL to DLBCL | |
| | | | | transformation | |
| DLBCL Vs. | NM_003403 | YY1 | YY1 transcription factor | Expression in | Down in FL |
| FL | | | | Fl vs. GC | |
| | | | | DLBCL | |
| DLBCL Vs. | NM_002910 | RENBP | renin binding protein | Expression in | Down in FL |
| FL | | | | Fl vs. GC | |
| | | | | DLBCL | |
| DLBCL Vs. | NM_000852 | GSTP1 | glutathione S-transferase | Expression in | Down in FL |
| FL | | | pi | Fl vs. GC | |
| | | | | DLBCL | |
| CLL vs. | NM_006495 | EVI2B | ecotropic viral | Resting B-cell | High in CLL |
| DLBCL | | | integration site 2B | signature | |
| DLBCL Vs. | NM_033306 | CASP4 | caspase 4, apoptosis- | Expression in | Down in FL |
| FL | | | related cysteine protease | Fl vs. GC | |
| | | | | DLBCL | |
| DLBCL Vs. | NM_006636 | MTHFD2 | methylene | Genes | Up in DLBCL; |
| FL | | | tetrahydrofolate | specific to | Down in FL; |
| | | | dehydrogenase (NAD+ | either | Up in |
| | | | dependent), | DLBCL or | transformation |
| | | | methenyltetrahydrofolate | FL; | from FL to |
| | | | cyclohydrolase | Expression in | DLBCL |
| | | | | FL to DLBCL | |
| | | | | transformation | |
| FL vs. | NM_002086 | GRB2 | growth factor receptor- | Genes | High in FL; |
| Burkitts; | | | bound protein 2 | significantly | Up in FL |
| DLBCL Vs. | | | | deregulated | |
| FL | | | | | |
| DLBCL Vs. | NM_058197 | CDKN2A | cyclin-dependent kinase | Expression in | Up in FL |
| FL; | | | inhibitor 2A (melanoma, | Fl vs. GC | |
| Deletions | | | p16, inhibits CDK4) | DLBCL | |
| associated | | | | | |
| with FL | | | | | |
| DLBCL Vs. | NM_002574 | PRDX1 | peroxiredoxin 1 | Genes | Up in DLBCL; |
| FL | | | | specific to | Down in FL |
| | | | | either | |
| | | | | DLBCL or | |
| | | | | FL | |
| DLBCL Vs. | NM_031966 | CCNB1 | cyclin B1 | Genes | Up in DLBCL; |
| FL | | | | specific to | Down in FL |
| | | | | either | |
| | | | | DLBCL or | |
| | | | | FL | |
| DLBCL Vs. | NM_002467 | MYC | v-myc myelocytomatosis | Signature | Uncertain in |
| FL | | | viral oncogene homolog | genes | Common |
| | | | (avian) | common to | Genes; Down |
| | | | | both Shipp | in |
| | | | | and Alizadeh | transformation |
| | | | | | from FL to |
| | | | | | DLBCL; Up in |
| | | | | | FL |
| CLL vs. | NM_001775 | CD38 | CD38 antigen (p45) | Hs.174944; | Low in CLL; |
| DLBCL | | | | Prognostically | High in G- |
| | | | | significant | center DLBCL |
| DLBCL Vs. | NM_004907 | ETR101 | immediate early protein | Expression in | Down in FL |
| FL | | | | Fl vs. GC | |
| | | | | DLBCL | |
| DLBCL Vs. | NM_000418 | IL4R | interleukin 4 receptor | Expression in | Up in FL |
| FL | | | | Fl vs. GC | |
| | | | | DLBCL | |
| DLBCL Vs. | NM_001344 | DAD1 | defender against cell | Expression in | Down in FL |
| FL | | | death 1 | Fl vs. GC | |
| | | | | DLBCL | |
| CLL vs. | NM_016187 | BIN2 | bridging integrator 2 | Resting B-cell | High in CLL |
| DLBCL | | | | signature | |
| CLL vs. | NM_001197 | BIK | BCL2-interacting killer | High in G- | Low in CLL; |
| DLBCL | | | (apoptosis-inducing) | center type | High in G- |
| | | | | DLBCL | center DLBCL |
| CLL vs. | NM_001706 | BCL6 | B-cell CLL/lymphoma 6 | High in G- | Low in CLL; |
| DLBCL | | | (zinc finger protein 51) | center type | High in G- |
| | | | | DLBCL | center DLBCL |
| CLL vs. | NM_000698 | ALOX5 | arachidonate 5- | Resting B-cell | High in CLL |
| DLBCL | | | lipoxygenase | signature | |
| CLL vs. | NM_002390 | ADAM11 | a disintegrin and | Resting B-cell | High in CLL |
| DLBCL | | | metalloproteinase | signature | |
| | | | domain 11 | | |
| DLBCL Vs. | NM_000884 | IMPDH2 | IMP (inosine | Genes | Up in DLBCL; |
| FL | | | monophosphate) | specific to | Down in FL; |
| | | | dehydrogenase 2 | either | Up in |
| | | | | DLBCL or | transformation |
| | | | | FL; | from FL to |
| | | | | Expression in | DLBCL |
| | | | | FL tp DLBCL | |
| | | | | transformation | |
| DLBCL Vs. | NM_002511 | NMBR | neuromedin B receptor | Expression in | Up in FL |
| FL | | | | Fl vs. GC | |
| | | | | DLBCL | |
| DLBCL Vs. | NM_005566 | LDHA | lactate dehydrogenase A | Genes | Up in DLBCL; |
| FL | | | | specific to | Down in FL; |
| | | | | either | Up in |
| | | | | DLBCL or | transformation |
| | | | | FL; | from FL to |
| | | | | Expression in | DLBCL |
| | | | | FL to DLBCL | |
| | | | | transformation | |
| DLBCL Vs. | NM_002166 | ID2 | inhibitor of DNA | Expression in | Up in FL |
| FL | | | binding 2, dominant | Fl vs. GC | |
| | | | negative helix-loop-helix | DLBCL | |
| | | | protein | | |
| DLBCL Vs. | NM_005526 | HSF1 | heat shock transcription | Expression in | Up in FL |
| FL | | | factor 1 | Fl vs. GC | |
| | | | | DLBCL | |
| DLBCL Vs. | NM_001901 | CTGF | connective tissue growth | Expression in | Up in FL |
| FL | | | factor | Fl vs. GC | |
| | | | | DLBCL | |
| DLBCL Vs. | NM_000365 | TPI1 | triosephosphate | Genes | Up in DLBCL; |
| FL | | | isomerase 1 | specific to | Down in FL; |
| | | | | either | Up in |
| | | | | DLBCL or | transformation |
| | | | | FL; | from FL to |
| | | | | Expression in | DLBCL |
| | | | | FL to DLBCL | |
| | | | | transformation | |
| DLBCL Vs. | NM_000269 | NME1 | non-metastatic cells 1, | Genes | Up in DLBCL; |
| FL | | | protein (NM23A) | specific to | Down in FL; |
| | | | expressed in | either | Up in |
| | | | | DLBCL or | transformation |
| | | | | FL; | from FL to |
| | | | | Expression in | DLBCL |
| | | | | FL to DLBCL | |
| | | | | transformation | |
| CLL vs. | NM_005214 | CTLA4 | cytotoxic T-lymphocyte- | CLL | High in CLL |
| DLBCL | | | associated protein 4 | signature vs. | |
| | | | | DLBCL | |
| DLBCL Vs. | NM_003070 | SMARCA2 | SWI/SNF related, matrix | Expression in | Up in FL |
| FL | | | associated, actin | Fl vs. GC | |
| | | | dependent regulator of | DLBCL | |
| | | | chromatin, subfamily a, | | |
| | | | member 2 | | |
| ABC VS | NM_002648 | PIM1 | pim-1 oncogene | Wright | Low in GC |
| GC | | | | predictor; | DLBCL; Up in |
| DLBCL; | | | | Expression in | Transformation |
| DLBCL Vs. | | | | FL to DLBCL | |
| FL | | | | transformation | |
| DLBCL Vs. | NM_021643 | TRB2 | tribbles homolog 2 | Genes | Down in |
| FL | | | | specific to | DLBCL, Up in |
| | | | | either | FL |
| | | | | DLBCL or | |
| | | | | FL | |
| Survival; | NM_021603 | FXYD2 | FXYD domain | Genes | Up in cured; |
| DLBCL Vs. | | | containing ion transport | Correlated | Down in fatal; |
| FL | | | regulator 2 | with Survival; | Up in |
| | | | | Expression in | Transformed |
| | | | | FL to DLBCL | DLBCL |
| | | | | transformation | |
| DLBCL Vs. | NM_004619 | TRAF5 | TNF receptor-associated | Genes | Down in |
| FL; MLBCL | | | factor 5 | specific to | DLBCL, Up in |
| vs. DLBCL | | | | either | FL; Low in |
| | | | | DLBCL or | MLBCL |
| | | | | FL | |
| DLBCL Vs. | NM_005998 | CCT3 | chaperonin containing | Genes | Up in DLBCL; |
| FL | | | TCP1, subunit 3 | specific to | Down in FL; |
| | | | (gamma) | either | Up in |
| | | | | DLBCL or | Transformation |
| | | | | FL; | |
| | | | | Expression in | |
| | | | | FL to DLBCL | |
| | | | | transformation | |
| DLBCL Vs. | NM_000034 | ALDOA | aldolase A, fructose- | Genes | Up in DLBCL; |
| FL | | | bisphosphate | specific to | Down in FL; |
| | | | | either | Up in |
| | | | | DLBCL or | Transformation |
| | | | | FL; | |
| | | | | Expression in | |
| | | | | FL to DLBCL | |
| | | | | transformation | |
| DLBCL vs. | NM_019841 | TRPV5 | transient receptor | Strong | Down in |
| MCL; | | | potential cation channel, | Classifier | DLBCL; Up in |
| CD5+/− | | | subfamily V, member 5 | Separating | MCL; Down |
| DLBCL | | | | MCLs and | in CD5+; Up |
| | | | | DLBCLs and | in CD5− |
| | | | | CD5+ from | |
| | | | | CD5− | |
| | | | | DLBCLs | |
| DLBCL Vs. | NM_002162 | ICAM3 | intercellular adhesion | Expression in | Down in |
| FL; DLBCL | | | molecule 3 | FL to DLBCL | Transformed |
| vs. MCL | | | | transformation; | DLBCL; |
| | | | | Strong | Down in |
| | | | | Classifier | DLBCL; Up in |
| | | | | Separating | MCL |
| | | | | MCLs and | |
| | | | | DLBCLs | |
| DLBCL Vs. | NM_001901 | CTGF | connective tissue growth | Expression in | Down in |
| FL | | | factor | FL to DLBCL | Transformed |
| | | | | transformation | DLBCL |
| ABC VS | NM_004630 | SF1 | splicing factor 1 | Signature | Uncertain in |
| GC DLBCL | | | | genes | Common |
| | | | | common to | Genes |
| | | | | both Shipp | |
| | | | | and Alizadeh | |
| ABC VS | NM_000418 | IL4R | interleukin 4 receptor | Signature | Uncertain in |
| GC DLBCL | | | | genes | Common |
| | | | | common to | Genes |
| | | | | both Shipp | |
| | | | | and Alizadeh | |
| ABC VS | NM_001882 | CRHBP | corticotropin releasing | Signature | Uncertain in |
| GC DLBCL | | | hormone binding protein | genes | Common |
| | | | | common to | Genes |
| | | | | both Shipp | |
| | | | | and Alizadeh | |
| ABC VS | NM_001775 | CD38 | CD38 antigen (p45) | Signature | Uncertain in |
| GC DLBCL | | | | genes | Common |
| | | | | common to | Genes |
| | | | | both Shipp | |
| | | | | and Alizadeh | |
| ABC VS | NM_003656 | CAMK1 | calcium/calmodulin- | Signature | Uncertain in |
| GC DLBCL | | | dependent protein kinase I | genes | Common |
| | | | | common to | Genes |
| | | | | both Shipp | |
| | | | | and Alizadeh | |
| Survival; | NM_002046 | GAPD | glyceraldehyde-3- | Genes | Down in |
| DLBCL Vs. | | | phosphate | Correlated | Cured; Up in |
| FL | | | dehydrogenase | with Survival; | Fatal; Up in |
| | | | | Expression in | Transformed |
| | | | | FL to DLBCL | DLBCL |
| | | | | transformation | |
| DLBCL Vs. | NM_000598 | IGFBP3 | insulin-like growth | Expression in | Down in |
| FL | | | factor binding protein 3 | FL to DLBCL | Transformed |
| | | | | transformation | DLBCL |
| MLBCL vs. | NM_002447 | MST1R | macrophage stimulating | MLBCL vs | High in |
| DLBCL | | | 1 receptor (c-met-related | DLBCL | MLBCL |
| | | | tyrosine kinase) | signature | |
| DLBCL vs. | NM_156039 | CSF3R | colony stimulating factor | Strong | Down in |
| MCL | | | 3 receptor (granulocyte) | Classifier | DLBCL; Up in |
| | | | | Separating | MCL |
| | | | | MCLs and | |
| | | | | DLBCLs | |
| DLBCL vs. | NM_181430 | ILF1 | interleukin enhancer | Strong | Down in |
| MCL | | | binding factor 1 | Classifier | DLBCL; Up in |
| | | | | Separating | MCL |
| | | | | MCLs and | |
| | | | | DLBCLs | |
| DLBCL vs. | NM_004475 | FLOT2 | flotillin 2 | Strong | Down in |
| MCL | | | | Classifier | DLBCL; Up in |
| | | | | Separating | MCL |
| | | | | MCLs and | |
| | | | | DLBCLs | |
| DLBCL vs. | NM_004941 | DHX8 | DEAH (Asp-Glu-Ala- | Strong | Down in |
| MCL | | | His) box polypeptide 8 | Classifier | DLBCL; Up in |
| | | | | Separating | MCL |
| | | | | MCLs and | |
| | | | | DLBCLs | |
| DLBCL vs. | NM_053056 | CCND1 | cyclin D1 (PRAD1: | Strong | Down in |
| MCL | | | parathyroid | Classifier | DLBCL; Up in |
| | | | adenomatosis 1) | Separating | MCL |
| | | | | MCLs and | |
| | | | | DLBCLs | |
| x (DLBCL) | NM_002738 | PRKCB1 | protein kinase C, beta 1 | Genes | Down in |
| | | | | Correlated | Cured; Up in |
| | | | | with Survival; | Fatal; Low in |
| | | | | MLBCL vs. | MLBCL |
| | | | | DLBCL | |
| Survival | NM_058197 | CDKN2A | cyclin-dependent kinase | Genes | Down in |
| (DLBCL) | | | inhibitor 2A (melanoma, | Correlated | Cured; Up in |
| | | | p16, inhibits CDK4) | with Survival | Fatal |
| ABC VS | BC011857 | IGHM | immunoglobulin heavy | Wright | Low in GC |
| GC | | | constant mu | predictor; | DLBCL; Low |
| DLBCL; | | | | Expression in | in MLBCL; |
| MLBCL vs. | | | | FL to DLBCL | Down in |
| DLBCL; | | | | transformation | Transformed |
| DLBCL Vs. | | | | | DLBCL |
| FL | | | | | |
| MLBCL vs. | NM_004972 | JAK2 | Janus kinase 2 (a protein | MLBCL vs | High in |
| DLBCL | | | tyrosine kinase) | DLBCL | MLBCL |
| | | | | signature | |
| MLBCL vs. | NM_006889 | CD86 | CD86 antigen (CD28 | MLBCL vs | High in |
| DLBCL | | | antigen ligand 2, B7-2 | DLBCL | MLBCL |
| | | | antigen) | signature | |
| MLBCL vs. | NM_001715 | BLK | B lymphoid tyrosine | MLBCL vs | Low in |
| DLBCL | | | kinase | DLBCL | MLBCL |
| | | | | signature | |
| DLBCL Vs. | NM_012203 | GRHPR | glyoxylate | Expression in | Up in |
| FL | | | reductase/hydroxypyruvate | FL to DLBCL | Transformation |
| | | | reductase | transformation | |
| DLBCL Vs. | NM_003070 | SMARCA 2 | SWI/SNF related, matrix | Expression in | Down in |
| FL | | | associated, actin | FL to DLBCL | Transformed |
| | | | dependent regulator of | transformation | DLBCL |
| | | | chromatin, subfamily a, | | |
| | | | member 2 | | |
| DLBCL Vs. | NM_004907 | ETR101 | immediate early protein | Expression in | Down in |
| FL | | | | FL to DLBCL | Transformed |
| | | | | transformation | DLBCL |
| DLBCL vs. | NM_134269 | SMTN | smoothelin | Strong | Down in |
| MCL | | | | Classifier | DLBCL; Up in |
| | | | | Separating | MCL |
| | | | | MCLs and | |
| | | | | DLBCLs | |
| DLBCL Vs. | NM_000405 | GM2A | GM2 ganglioside | Genes | Up in DLBCL; |
| FL | | | activator protein | specific to | Down in FL |
| | | | | either | |
| | | | | DLBCL or | |
| | | | | FL | |
| ABC VS | NM_002460 | IRF4 | interferon regulatory | Wright | Low in GC |
| GC | | | factor 4, MUM1 | predictor; | DLBCL; |
| DLBCL; | | | | Signature | Uncertain in |
| DLBCL Vs. | | | | genes | Common |
| FL | | | | common to | Genesin |
| | | | | both Shipp | Common |
| | | | | and Alizadeh; | Genes; Up in |
| | | | | Expression in | Transformed |
| | | | | FL to DLBCL | DLBCL |
| | | | | transformation | |
| ABC VS | NM_002467 | MYC | v-myc myelocytomatosis | Signature | Uncertain in |
| GC | | | viral oncogene homolog | genes | Common |
| DLBCL; | | | (avian) | common to | Genes; Down |
| DLBCL Vs. | | | | both Shipp | in Cured; Up |
| FL | | | | and Alizadeh; | in Fatal; Down |
| | | | | Rosenwald | in |
| | | | | Survival | Transformation; |
| | | | | Predictor | Up in |
| | | | | Genes | Transformed |
| | | | | | DLBCL, de |
| | | | | | Vos |
| DLBCL Vs. | NM_006325 | RAN | RAN, member RAS | Expression in | Up in |
| FL | | | oncogene family | FL to DLBCL | transformation |
| | | | | transformation | from FL to |
| | | | | | DLBCL |
| DLBCL Vs. | NM_002129 | HMGB2 | high-mobility group box 2 | Expression in | Up in |
| FL | | | | FL to DLBCL | transformation |
| | | | | transformation | from FL to |
| | | | | | DLBCL |
| DLBCL Vs. | NM_005340 | HINT1 | histidine triad nucleotide | Expression in | Up in |
| FL | | | binding protein 1 | FL to DLBCL | transformation |
| | | | | transformation | from FL to |
| | | | | | DLBCL |
| DLBCL Vs. | NM_006472 | TXNIP | thioredoxin interacting | Genes | Down in |
| FL | | | protein | specific to | DLBCL, Up in |
| | | | | either | FL; Down in |
| | | | | DLBCL or | Transformed |
| | | | | FL; | DLBCL |
| | | | | Expression in | |
| | | | | FL to DLBCL | |
| | | | | transformation | |
| DLBCL Vs. | NM_001783 | CD79A | CD79A antigen | Expression in | Up in |
| FL | | | (immunoglobulin- | FL to DLBCL | transformation |
| | | | associated aHCPha) | transformation | from FL to |
| | | | | | DLBCL |
| ABC VS | NM_001706 | BCL6 | B-cell CLL/lymphoma 6 | Wright | High in GC |
| GC DLBCL | | | (zinc finger protein 51) | predictor; | DLBCL; |
| | | | | Signature | Uncertain in |
| | | | | genes | Common |
| | | | | common to | Genesin |
| | | | | both Shipp | Common |
| | | | | and Alizadeh; | Genes; Up in |
| | | | | Rosenwald | cured; Down |
| | | | | Survival | in fatal |
| | | | | Predictor | |
| | | | | Genes | |
| DLBCL Vs. | NM_002648 | PIM1 | pim-1 oncogene | Wright | Low in GC |
| FL | | | | predictor; | DLBCL; Up in |
| | | | | Expression in | transformation |
| | | | | FL to DLBCL | from FL to |
| | | | | transformation | DLBCL |
| DLBCL Vs. | NM_021960 | Mcl-1 | myeloid cell leukemia | Genes up | High in FL |
| FL | | | sequence 1 (BCL2- | regulated in | |
| | | | related) (MCL1) | FL | |
| DLBCL Vs. | NM_002838 | PTPRC | protein tyrosine | Expression in | Down in |
| FL | | | phosphatase, receptor | FL to DLBCL | transformation |
| | | | type, C | transformation | from FL to |
| | | | | | DLBCL |
| DLBCL Vs. | NM_152866 | MS4A1 | membrane-spanning 4- | Expression in | Down in |
| FL | | | domains, subfamily A, | FL to DLBCL | transformation |
| | | | member 1 | transformation | from FL to |
| | | | | | DLBCL |
| DLBCL Vs. | NM_006495 | EVI2B | ecotropic viral | Expression in | Down in |
| FL | | | integration site 2B | FL to DLBCL | transformation |
| | | | | transformation | from FL to |
| | | | | | DLBCL |
| DLBCL Vs. | NM_001647 | APOD | apolipoprotein D | Expression in | Down in |
| FL | | | | FL to DLBCL | transformation |
| | | | | transformation | from FL to |
| | | | | | DLBCL |
| DLBCL Vs. | NM_000626 | CD79B | CD79B antigen | Expression in | Up in |
| FL | | | (immunoglobulin- | FL to DLBCL | transformation |
| | | | associated beta) | transformation | from FL to |
| | | | | | DLBCL |
| ABC VS | NM_001092 | ABR | active BCR-related gene | Signature | Uncertain in |
| GC | | | | genes | Common |
| DLBCL; | | | | common to | Genes; Down |
| DLBCL vs. | | | | both Shipp | in DLBCL; Up |
| MCL | | | | and Alizadeh; | in MCL |
| | | | | Strong | |
| | | | | Classifier | |
| | | | | Separating | |
| | | | | MCLs and | |
| | | | | DLBCLs | |
| DLBCL vs. | NM_000277 | PAH | phenylalanine | Strong | Down in |
| MCL | | | hydroxylase | Classifier | DLBCL; Up in |
| | | | | Separating | MCL |
| | | | | MCLs and | |
| | | | | DLBCLs | |
| ABC VS | NM_000698 | ALOX5 | arachidonate 5- | Signature | Uncertain in |
| GC | | | lipoxygenase | genes | Common |
| DLBCL; | | | | common to | Genes; Down |
| DLBCL Vs. | | | | both Shipp | in |
| FL | | | | and Alizadeh; | Transformed |
| | | | | Expression in | DLBCL |
| | | | | FL to DLBCL | |
| | | | | transformation | |
| ABC VS | XM_034274 | MYBL1 | v-myb myeloblastosis | Wright | High in GC |
| GC DLBCL | | | viral oncogene homolog | predictor; | DLBCL; |
| | | | (avian)-like 1 | Signature | Uncertain in |
| | | | | genes | Common |
| | | | | common to | Genesin |
| | | | | both Shipp | Common |
| | | | | and Alizadeh | Genes |
| ABC VS | NM_006152 | LRMP | lymphoid-restricted | Wright | High in GC |
| GC DLBCL | | | membrane protein | predictor; | DLBCL; |
| | | | | Signature | Uncertain in |
| | | | | genes | Common |
| | | | | common to | Genesin |
| | | | | both Shipp | Common |
| | | | | and Alizadeh | Genes |
| ABC VS | NM_005574 | LMO2 | LIM domain only 2 | Wright | High in GC |
| GC DLBCL | | | (rhombotin-like 1) | predictor; | DLBCL; |
| | | | | Signature | Uncertain in |
| | | | | genes | Common |
| | | | | common to | Genesin |
| | | | | both Shipp | Common |
| | | | | and Alizadeh | Genes |
| ABC VS | NM_001987 | ETV6 | ets variant gene 6 (TEL | Wright | Low in GC |
| GC DLBCL | | | oncogene) | predictor; | DLBCL; |
| | | | | Signature | Uncertain in |
| | | | | genes | Common |
| | | | | common to | Genesin |
| | | | | both Shipp | Common |
| | | | | and Alizadeh | Genes |
| ABC VS | NM_001242 | TNTFRSF7 | tumor necrosis factor | Signature | Uncertain in |
| GC | | | receptor superfamily, | genes | Common |
| DLBCL; | | | member 7 | common to | Genes; Low in |
| MLBCL vs. | | | | both Shipp | MLBCL; |
| DLBCL; | | | | and Alizadeh; | Down in |
| DLBCL Vs. | | | | MLBCL vs. | Transformed |
| FL | | | | DLBCL; | DLBCL |
| | | | | Expression in | |
| | | | | FL to DLBCL | |
| | | | | transformation | |
| ABC VS | NM_002166 | ID2 | inhibitor of DNA | Signature | Uncertain in |
| GC DLBCL | | | binding 2, dominant | genes | Common |
| | | | negative helix-loop-helix | common to | Genes; Up in |
| | | | protein | both Shipp | CD5+; Down |
| | | | | and Alizadeh; | in CD5− |
| | | | | Strong | |
| | | | | Classifier | |
| | | | | Genes | |
| | | | | Separating | |
| | | | | CD5+ from | |
| | | | | CD5− | |
| | | | | DLBCLs | |
| ABC VS | NM_000633 | BCL2 | B-cell CLL/lymphoma 2 | Signature | Uncertain in |
| GC | | | | genes | Common |
| DLBCL; | | | | common to | Genes; Down |
| DLBCL Vs. | | | | both Shipp | in |
| FL | | | | and Alizadeh | Transformed |
| | | | | | DLBCL |
| MLBCL vs. | NM_003254 | TIMP1 | tissue inhibitor of | MLBCL vs | High in |
| DLBCL | | | metalloproteinase 1 | DLBCL | MLBCL |
| | | | (erythroid potentiating | signature | |
| | | | activity, collagenase | | |
| | | | inhibitor) | | |
| DLBCL Vs. | NM_006184 | NUCB1 | nucleobindin 1 | Expression in | Up in |
| FL | | | | FL to DLBCL | Transformed |
| | | | | transformation | DLBCL |
| ABC VS | NM_007289 | MME | membrane metallo- | Wright | High in GC |
| GC | | | endopeptidase (neutral | predictor; | DLBCL; |
| DLBCL; | | | endopeptidase, | Signature | Uncertain in |
| MLBCL vs. | | | enkephalinase, CALLA, | genes | Common |
| DLBCL | | | CD10) | common to | Genes; Up in |
| | | | | both Shipp | cured; Down |
| | | | | and Alizadeh; | in fatal; Low |
| | | | | MLBCL vs. | in MLBCL |
| | | | | DLBCL | |
| | | | | signature | |
| ABC VS | NM_004513 | IL16 | interleukin 16 | Wright | Low in GC |
| GC | | | (lymphocyte | predictor; | DLBCL; |
| DLBCL; | | | chemoattractant factor) | Signature | Uncertain in |
| MLBCL vs. | | | | genes | Common |
| DLBCL | | | | common to | Genes; Low in |
| | | | | both Shipp | MLBCL |
| | | | | and Alizadeh; | |
| | | | | MLBCL vs. | |
| | | | | DLBCL | |
| | | | | signature | |
| ABC VS | NM_001877 | CR2 | complement component | Signature | Uncertain in |
| GC | | | (3d/Epstein Barr virus) | genes | Common |
| DLBCL; | | | receptor 2 | common to | Genes; Down |
| DLBCL Vs. | | | | both Shipp | in |
| FL | | | | and Alizadeh; | Transformed |
| | | | | Expression in | DLBCL |
| | | | | FL to DLBCL | |
| | | | | transformation | |
| DLBCL Vs. | NM_001831 | CLU | clusterin (complement | Genes | Down in |
| FL | | | lysis inhibitor, SP-40,40, | specific to | DLBCL, Up in |
| | | | sulfated glycoprotein 2, | either | FL; Down in |
| | | | testosterone-repressed | DLBCL or | Transformed |
| | | | prostate message 2, | FL; | DLBCL |
| | | | apolipoprotein J) | Expression in | |
| | | | | FL to DLBCL | |
| | | | | transformation | |
| ABC VS | NM_001923 | DDB1 | damage-specific DNA | Wright | Low in GC |
| GC DLBCL | | | binding protein 1, | predictor; | DLBCL; |
| | | | 127 kDa | Signature | Uncertain in |
| | | | | genes | Common |
| | | | | common to | Genesin |
| | | | | both Shipp | Common |
| | | | | and Alizadeh | Genes |

TABLE 7
An HCP set specific for FL, according to one embodiment of the invention

| Feature | Accession | Symbol | Name | Notes | Level |
|---|---|---|---|---|---|
| FL | BC011857 | IGHM | immunoglobulin heavy | | Down in FL (−6.6) |
| | | | constant mu | | |
| FL; MCL | NM_000424 | KRT5 | keratin 5 (epidermolysis | | down in FL (−5.3); |
| | | | bullosa simplex, | | down in |
| | | | Dowling- | | MCL (−4) |
| | | | Meara/Kobner/Weber- | | |
| | | | Cockayne types) | | |
| FL vs MCL | AB037771 | USP53 | ubiquitin specific | | up in FL vs |
| | | | protease 53 | | MCL (4.2) |
| FL vs | NM_025113 | C13orf18 | chromosome 13 open | | down in FL vs |
| CLL/SLL | | | reading frame 18 | | SLL (−5.3) |
| FL vs MCL | NM_000418 | IL4R | interleukin 4 receptor | | up in FL vs |
| | | | | | MCL (5.4) |
| FL vs MCL | NM_001781 | CD69 | CD69 antigen (p60, | | down in FL vs |
| | | | early T-cell activation | | MCL (−4.1) |
| | | | antigen) | | |
| FL | NM_002984 | CCL4 | chemokine (C-C motif) | | down in FL (−5.6) |
| | | | ligand 4 | | |
| FL vs MCL | NM_000405 | GM2A | GM2 ganglioside | | down in FL vs |
| | | | activator | | MCL (−4.4) |
| FL vs MCL | NM_002228 | JUN | v-jun sarcoma virus 17 | | down in FL vs |
| | | | oncogene homolog | | MCL (−4.6) |
| | | | (avian) | | |
| FL | NM_006850 | IL24 | interleukin 24 | | down in FL (−8.1) |
| FL vs MCL | NM_006475 | POSTN | periostin, osteoblast | | Up in FL vs |
| | | | specific factor | | MCL (4) |
| FL vs SLL | NM_031942 | CDCA7 | cell division cycle | | Up in FL vs |
| | | | associated 7 | | SLL (8.8) |
| FL vs MCL | NM_001640 | APEH | N-acylaminoacyl-peptide | | down in MCL |
| | | | hydrolase | | (−6.5); up in |
| | | | | | FL vs MCL |
| | | | | | (6) |
| FL vs MCL | NM_018842 | LOC55971 | insulin receptor tyrosine | | down in FL vs |
| | | | kinase substrate | | MCL (−8.4) |
| FL | NM_147180 | PPP3R2 | protein phosphatase 3 | | down in FL (−4.4) |
| | | | (formerly 2B), | | |
| | | | regulatory subunit B, | | |
| | | | 19 kDa, beta isoform | | |
| | | | (calcineurin B, type II) | | |
| FL | NM_002276 | KRT19 | keratin 19 | | down in FL (−5) |
| FL | NM_001675 | ATF4 | activating transcription | | up in FL (4.4) |
| | | | factor 4 (tax-responsive | | |
| | | | enhancer element B67) | | |
| FL vs MCL | NM_021813 | BACH2 | BTB and CNC | | up in FL vs |
| | | | homology 1, basic | | MCL (5.5) |
| | | | leucine zipper | | |
| | | | transcription factor 2 | | |
| FL | NM_006565 | CTCF | CCCTC-binding factor | | up in FL vs |
| | | | (zinc finger protein) | | MCL (9.3); up |
| | | | | | in FL vs SLL |
| | | | | | (10.2) |
| FL | NM_005537 | ING1 | inhibitor of growth | | up in FL (4.5) |
| | | | family, member 1 | | |
| FL vs MCL | NM_006164 | NFE2L2 | nuclear factor (erythroid- | | up in FL vs |
| | | | derived 2)-like 2 | | MCL (4.1) |
| FL | NM_004630 | SF1 | splicing factor 1 | | down in FL (−4.2) |
| CLL/SLL vs | NM_019846 | CCL28 | chemokine (C-C motif) | | up in FL vs |
| FL | | | ligand 28 | | CLL/SLL |
| | | | | | (5.2) |
| FL vs MCL | NM_006889 | CD86 | CD86 antigen (CD28 | | up in FL vs |
| | | | antigen ligand 2, B7-2 | | MCL (7.9) |
| | | | antigen) | | |
| FL | NM_032738 | FREB | Fc receptor homolog | | up in FL (4.8) |
| | | | expressed in B cells | | |
| FL | BC019046 | IGHG1 | immunoglobulin heavy | | down in FL (−6.6) |
| | | | constant gamma 1 (G1m | | |
| | | | marker) | | |
| FL | NM_002189 | IL15RA | interleukin 15 receptor, | | down in FL (−4.1) |
| | | | aHCPha | | |
| FL | NM_004827 | ABCG2 | ATP-binding cassette, | | down in FL (−8.4) |
| | | | sub-family G (WHITE), | | |
| | | | member 2 | | |
| FLL | NM_001647 | APOD | apolipoprotein D | | down in FL vs |
| | | | | | MCL (−8.3); |
| | | | | | down in FL vs |
| | | | | | CLL/SLL (−5.8) |
| DLBCL Vs. | NM_002467 | MYC | v-myc myelocytomatosis | Signature | Uncertain in |
| FL | | | viral oncogene homolog | genes | Common |
| | | | (avain) | common to | Genes; Down |
| | | | | both Shipp | in |
| | | | | and Alizadeh | transformation |
| | | | | | from FL to |
| | | | | | DLBCL; Up in |
| | | | | | FL |
| DLBCL Vs. | NM_031966 | CCNB1 | cyclin B1 | Genes | Up in DLBCL; |
| FL | | | | specific to | Down in FL |
| | | | | either | |
| | | | | DLBCL or | |
| | | | | FL | |
| DLBCL Vs. | NM_002574 | PRDX1 | peroxiredoxin 1 | Genes | Up in DLBCL; |
| FL | | | | specific to | Down in FL |
| | | | | either | |
| | | | | DLBCL or | |
| | | | | FL | |
| DLBCL Vs. | NM_058197 | CDKN2A | cyclin-dependent kinase | Expression in | Up in FL |
| FL; | | | inhibitor 2A (melanoma, | Fl vs. GC | |
| Deletions | | | p16, inhibits CDK4) | DLBCL | |
| associated | | | | | |
| with FL | | | | | |
| FL vs. | NM_002086 | GRB2 | growth factor receptor- | Genes | High in FL; |
| Burkitts; | | | bound protein 2 | significantly | Up in FL |
| DLBCL Vs. | | | | deregulated | |
| FL | | | | | |
| DLBCL Vs. | NM_001197 | BIK | BCL2-interacting killer | Expression in | Down in FL |
| FL | | | (apoptosis-inducing) | Fl vs. GC | |
| | | | | DLBCL | |
| DLBCL Vs. | NM_033306 | CASP4 | caspase 4, apoptosis- | Expression in | Down in FL |
| FL | | | related cysteine protease | Fl vs. GC | |
| | | | | DLBCL | |
| DLBCL Vs. | NM_004907 | ETR101 | immediate early protein | Expression in | Down in FL |
| FL | | | | Fl vs. GC | |
| | | | | DLBCL | |
| DLBCL Vs. | NM_000852 | GSTP1 | glutathione S-transferase | Expression in | Down in FL |
| FL | | | pi | Fl vs. GC | |
| | | | | DLBCL | |
| DLBCL Vs. | NM_002910 | RENBP | renin binding protein | Expression in | Down in FL |
| FL | | | | Fl vs. GC | |
| | | | | DLBCL | |
| DLBCL Vs. | NM_003403 | YY1 | YY1 transcription factor | Expression in | Down in FL |
| FL | | | | Fl vs. GC | |
| | | | | DLBCL | |
| DLBCL Vs. | NM_004044 | ATIC | 5-aminoimidazole-4- | Genes | Up in DLBCL; |
| FL | | | carboxamide | specific to | Down in FL; |
| | | | ribonucleotide | either | Up in |
| | | | formyltransferase/IMP | DLBCL or | transformation |
| | | | cyclohydrolase | FL; | from FL to |
| | | | | Expression in | DLBCL |
| | | | | FL to DLBCL | |
| | | | | transformation | |
| DLBCL Vs. | NM_002168 | IDH2 | isocitrate dehydrogenase | Genes | Up in DLBCL; |
| FL | | | 2 (NADP+), | specific to | Down in FL; |
| | | | mitochondrial | either | Up in |
| | | | | DLBCL or | transformation |
| | | | | FL; | from FL to |
| | | | | Expression in | DLBCL |
| | | | | FL to DLBCL | |
| | | | | transformation | |
| DLBCL Vs. | NM_000884 | IMPDH2 | IMP (inosine | Genes | Up in DLBCL; |
| FL | | | monophosphate) | specific to | Down in FL; |
| | | | dehydrogenase 2 | either | Up in |
| | | | | DLBCL or | transformation |
| | | | | FL; | from FL to |
| | | | | Expression in | DLBCL |
| | | | | FL to DLBCL | |
| | | | | transformation | |
| DLBCL Vs. | NM_005566 | LDHA | lactate dehydrogenase A | Genes | Up in DLBCL; |
| FL | | | | specific to | Down in FL; |
| | | | | either | Up in |
| | | | | DLBCL or | transformation |
| | | | | FL; | from FL to |
| | | | | Expression in | DLBCL |
| | | | | FL to DLBCL | |
| | | | | transformation | |
| DLBCL Vs. | NM_006636 | MTHFD2 | methylene | Genes | Up in DLBCL; |
| FL | | | tetrahydrofolate | specific to | Down in FL; |
| | | | dehydrogenase (NAD+ | either | Up in |
| | | | dependent), | DLBCL or | transformation |
| | | | methenyltetrahydrofolate | FL; | from FL to |
| | | | cyclohydrolase | Expression in | DLBCL |
| | | | | FL to DLBCL | |
| | | | | transformation | |
| DLBCL Vs. | NM_000269 | NME1 | non-metastatic cells 1, | Genes | Up in DLBCL; |
| FL | | | protein (NM23A) | specific to | Down in FL; |
| | | | expressed in | either | Up in |
| | | | | DLBCL or | transformation |
| | | | | FL; | from FL to |
| | | | | Expression in | DLBCL |
| | | | | FL to DLBCL | |
| | | | | transformation | |
| DLBCL Vs. | NM_000365 | TPI1 | triosephosphate | Genes | Up in DLBCL; |
| FL | | | isomerase 1 | specific to | Down in FL; |
| | | | | either | Up in |
| | | | | DLBCL or | transformation |
| | | | | FL; | from FL to |
| | | | | Expression in | DLBCL |
| | | | | FL to DLBCL | |
| | | | | transformation | |
| DLBCL Vs. | NM_001901 | CTGF | connective tissue growth | Expression in | Up in FL |
| FL | | | factor | Fl vs. GC | |
| | | | | DLBCL | |
| DLBCL Vs. | NM_005526 | HSF1 | heat shock transcription | Expression in | Up in FL |
| FL | | | factor 1 | Fl vs. GC | |
| | | | | DLBCL | |
| DLBCL Vs. | NM_002166 | ID2 | inhibitor of DNA | Expression in | Up in FL |
| FL | | | binding 2, dominant | Fl vs. GC | |
| | | | negative helix-loop-helix | DLBCL | |
| | | | protein | | |
| DLBCL Vs. | NM_000418 | IL4R | interleukin 4 receptor | Expression in | Up in FL |
| FL | | | | Fl vs. GC | |
| | | | | DLBCL | |
| DLBCL Vs. | NM_002511 | NMBR | neuromedin B receptor | Expression in | Up in FL |
| FL | | | | Fl vs. GC | |
| | | | | DLBCL | |
| DLBCL Vs. | NM_003070 | SMARCA2 | SWI/SNF related, matrix | Expression in | Up in FL |
| FL | | | associated, actin | Fl vs. GC | |
| | | | dependent regulator of | DLBCL | |
| | | | chromatin, subfamily a, | | |
| | | | member 2 | | |
| FL vs. | NM_000633 | BCL2 | B-cell CLL/lymphoma 2 | Genes | High in FL; |
| Burkitts; | | | | significantly | Up in FL |
| DLBCL Vs. | | | | deregulated; | |
| FL | | | | Genes up | |
| | | | | regulated in | |
| | | | | FL; | |
| | | | | Prognostically | |
| | | | | significant | |
| DLBCL Vs. | NM_002228 | JUN | v-jun sarcoma virus 17 | Expression in | Up in FL |
| FL | | | oncogene homolog | Fl vs. GC | |
| | | | (avian) | DLBCL | |
| DLBCL Vs. | NM_007146 | ZNF161 | zinc finger protein 161 | Expression in | Up in FL |
| FL | | | | Fl vs. GC | |
| | | | | DLBCL | |
| DLBCL Vs. | NM_002266 | KPNA2 | karyopherin aHCPha 2 | Genes | Up in |
| FL | | | (RAG cohort 1, importin | specific to | transformation |
| | | | aHCPha 1) | either | from FL to |
| | | | | DLBCL or | DLBCL |
| | | | | FL; | |
| | | | | Expression in | |
| | | | | FL to DLBCL | |
| | | | | transformation | |
| DLBCL Vs. | NM_004310 | ARHH | ras homolog gene | Genes | Down in |
| FL; BCL6 | | | family, member H | specific to | DLBCL, Up in |
| Translocation | | | | either | FL; ? |
| Partners | | | | DLBCL or | |
| | | | | FL; Shipp and | |
| | | | | Alizadeh | |
| | | | | Common | |
| | | | | Genes; | |
| | | | | Akasaka: | |
| | | | | Translocation | |
| | | | | partner of | |
| | | | | BCL6 but exp | |
| | | | | data not | |
| | | | | shown | |
| DLBCL Vs. | NM_006152 | LRMP | lymphoid-restricted | Shipp and | High in |
| FL; BCL6 | | | membrane protein | Alizadeh | DLBCL; ? |
| Translocation | | | | Common | |
| Partners | | | | Genes; | |
| | | | | Akasaka: | |
| | | | | Translocation | |
| | | | | partner of | |
| | | | | BCL6 but exp | |
| | | | | data not | |
| | | | | shown | |
| DLBCL Vs. | NM_012203 | GRHPR | glyoxylate | Expression in | Up in |
| FL; BCL6 | | | reductase/hydroxypyruvate | FL to DLBCL | transformation |
| Translocation | | | reductase | transformation; | from FL to |
| Partners | | | | Translocation | DLBCL |
| | | | | partner of | |
| | | | | BCL6 but exp | |
| | | | | data not | |
| | | | | shown | |
| DLBCL Vs. | NM_002046 | GAPD | glyceraldehyde-3- | Genes | Up in |
| FL | | | phosphate | Correlated | transformation |
| | | | dehydrogenase | with Survival; | from FL to |
| | | | | Expression in | DLBCL |
| | | | | FL to DLBCL | |
| | | | | transformation | |
| DLBCL Vs. | NM_001781 | CD69 | CD69 antigen (p60, | Genes | Down in |
| FL | | | early T-cell activation | specific to | DLBCL, Up in |
| | | | antigen) | either | FL |
| | | | | DLBCL or | |
| | | | | FL | |
| DLBCL Vs. | NM_001891 | CSN2 | casein beta | Genes | Down in |
| FL | | | | specific to | DLBCL, Up in |
| | | | | either | FL |
| | | | | DLBCL or | |
| | | | | FL | |
| FL | NM_022829 | SLC13A3 | solute carrier family 13 | | up in FL (4.3) |
| | | | (sodium-dependent | | |
| | | | dicarboxylate | | |
| | | | transporter), member 3 | | |
| DLBCL Vs. | NM_006851 | GLIPR1 | GLI pathogenesis-related | Genes | Down in |
| FL | | | 1 (glioma) | specific to | DLBCL, Up in |
| | | | | either | FL |
| | | | | DLBCL or | |
| | | | | FL | |
| DLBCL Vs. | NM_005582 | LY64 | lymphocyte antigen 64 | Genes | Down in |
| FL | | | homolog, radioprotective | specific to | DLBCL, Up in |
| | | | 105 kDa (mouse) | either | FL |
| | | | | DLBCL or | |
| | | | | FL | |
| DLBCL Vs. | NM_021643 | TRB2 | tribbles homolog 2 | Genes | Down in |
| FL | | | | specific to | DLBCL, Up in |
| | | | | either | FL |
| | | | | DLBCL or | |
| | | | | FL | |
| DLBCL Vs. | NM_006472 | TXNIP | thioredoxin interacting | Genes | Down in |
| FL | | | protein | specific to | DLBCL, Up in |
| | | | | either | FL |
| | | | | DLBCL or | |
| | | | | FL | |
| DLBCL Vs. | NM_001344 | DAD1 | defender against cell | Expression in | Down in FL |
| FL | | | death 1 | Fl vs. GC | |
| | | | | DLBCL | |
| DLBCL Vs. | NM_001647 | APOD | apolipoprotein D | Expression in | Down in |
| FL | | | | FL to DLBCL | transformation |
| | | | | transformation | from FL to |
| | | | | | DLBCL |
| DLBCL Vs. | NM_006495 | EVI2B | ecotropic viral | Expression in | Down in |
| FL | | | integration site 2B | FL to DLBCL | transformation |
| | | | | transformation | from FL to |
| | | | | | DLBCL |
| DLBCL Vs. | NM_152866 | MS4A1 | membrane-spanning 4- | Expression in | Down in |
| FL | | | domains, subfamily A, | FL to DLBCL | transformation |
| | | | member 1 | transformation | from FL to |
| | | | | | DLBCL |
| DLBCL Vs. | NM_002838 | PTPRC | protein tyrosine | Expression in | Down in |
| FL | | | phosphatase, receptor | FL to DLBCL | transformation |
| | | | type, C | transformation | from FL to |
| | | | | | DLBCL |
| DLBCL Vs. | NM_021960 | Mcl-1 | myeloid cell leukemia | Genes up | High in FL |
| FL | | | sequence 1 (BCL2- | regulated in | |
| | | | related) (MCL1) | FL | |
| DLBCL Vs. | NM_002648 | PIM1 | pim-1 oncogene | Wright | Low in GC |
| FL | | | | predictor; | DLBCL; Up in |
| | | | | Expression in | transformation |
| | | | | FL to DLBCL | from FL to |
| | | | | transformation | DLBCL |
| DLBCL Vs. | NM_000405 | GM2A | GM2 ganglioside | Genes | Up in DLBCL; |
| FL | | | activator protein | specific to | Down in FL |
| | | | | either | |
| | | | | DLBCL or | |
| | | | | FL | |
| DLBCL Vs. | NM_001783 | CD79A | CD79A antigen | Expression in | Up in |
| FL | | | (immunoglobulin- | FL to DLBCL | transformation |
| | | | associated aHCPha) | transformation | from FL to |
| | | | | | DLBCL |
| DLBCL Vs. | NM_000626 | CD79B | CD79B antigen | Expression in | Up in |
| FL | | | (immunoglobulin- | FL to DLBCL | transformation |
| | | | associated beta) | transformation | from FL to |
| | | | | | DLBCL |
| CLL/SL vs | NM_006820 | C1orf29 | chromosome 1 open | | down in FL vs |
| FL | | | reading frame 29 | | MCL (−4.3) |
| DLBCL Vs. | NM_005340 | HINT1 | histidine triad nucleotide | Expression in | Up in |
| FL | | | binding protein 1 | FL to DLBCL | transformation |
| | | | | transformation | from FL to |
| | | | | | DLBCL |
| DLBCL Vs. | NM_002129 | HMGB2 | high-mobility group box 2 | Expression in | Up in |
| FL | | | | FL to DLBCL | transformation |
| | | | | transformation | from FL to |
| | | | | | DLBCL |
| DLBCL Vs. | NM_006325 | RAN | RAN, member RAS | Expression in | Up in |
| FL | | | oncogene family | FL to DLBCL | transformation |
| | | | | transformation | from FL to |
| | | | | | DLBCL |
| FL vs. | NM_000277 | PAH | phenylalanine | Genes | High in FL |
| Burkitts | | | hydroxylase | significantly | |
| | | | | deregulated | |
| FL vs. | NM_133480 | TADA3L | transcriptional adaptor 3 | Genes | High in FL |
| Burkitts | | | (NGG1 homolog, yeast)- | significantly | |
| | | | like | deregulated | |
| FL vs. | NM_003656 | CAMK1 | calcium/calmodulin- | Genes | High in FL |
| Burkitts | | | dependent protein kinase I | significantly | |
| | | | | deregulated | |
| FL vs. | NM_005248 | FGR | Gardner-Rasheed feline | Genes | Low in FL |
| Burkitts | | | sarcoma viral (v-fgr) | significantly | |
| | | | oncogene homolog | deregulated | |
| FL vs. | NM_002447 | MST1R | macrophage stimulating | Genes | Low in FL |
| Burkitts | | | 1 receptor (c-met-related | significantly | |
| | | | tyrosine kinase) | deregulated | |
| FL vs. | NM_003254 | TIMP1 | tissue inhibitor of | Genes | Low in FL |
| Burkitts | | | metalloproteinase 1 | significantly | |
| | | | (erythroid potentiating | deregulated | |
| | | | activity, collagenase | | |
| | | | inhibitor) | | |
| ABC VS | NM_002467 | MYC | v-myc myelocytomatosis | Signature | Uncertain in |
| GC | | | viral oncogene homolog | genes | Common |
| DLBCL; | | | (avian) | common to | Genes; Down |
| DLBCL Vs. | | | | both Shipp | in Cured; Up |
| FL | | | | and Alizadeh; | in Fatal; Down |
| | | | | Rosenwald | in |
| | | | | Survival | Transformation; |
| | | | | Predictor | Up in |
| | | | | Genes | Transformed |
| | | | | | DLBCL, de |
| | | | | | Vos |
| ABC VS | NM_002460 | IRF4 | interferon regulatory | Wright | Low in GC |
| GC | | | factor 4, MUM1 | predictor; | DLBCL; |
| DLBCL; | | | | Signature | Uncertain in |
| DLBCL Vs. | | | | genes | Common |
| FL | | | | common to | Genesin |
| | | | | both Shipp | Common |
| | | | | and Alizadeh; | Genes; Up in |
| | | | | Expression in | Transformed |
| | | | | FL to DLBCL | DLBCL |
| | | | | transformation | |
| ABC VS | NM_001242 | TNFRSF7 | tumor necrosis factor | Signature | Uncertain in |
| GC | | | receptor superfamily, | genes | Common |
| DLBCL; | | | member 7 | common to | Genes; Low in |
| MLBCL vs. | | | | both Shipp | MLBCL; |
| DLBCL; | | | | and Alizadeh; | Down in |
| DLBCL Vs. | | | | MLBCL vs. | Transformed |
| FL | | | | DLBCL; | DLBCL |
| | | | | Expression in | |
| | | | | FL to DLBCL | |
| | | | | transformation | |
| ABC VS | NM_000633 | BCL2 | B-cell CLL/lymphoma 2 | Signature | Uncertain in |
| GC | | | | genes | Common |
| DLBCL; | | | | common to | Genes; Down |
| DLBCL Vs. | | | | both Shipp | in |
| FL | | | | and Alizadeh | Transformed |
| | | | | | DLBCL |
| ABC VS | NM_001877 | CR2 | complement component | Signature | Uncertain in |
| GC | | | (3d/Epstein Barr virus) | genes | Common |
| DLBCL; | | | receptor 2 | common to | Genes; Down |
| DLBCL Vs. | | | | both Shipp | in |
| FL | | | | and Alizadeh; | Transformed |
| | | | | Expression in | DLBCL |
| | | | | FL to DLBCL | |
| | | | | transformation | |
| DLBCL Vs. | NM_006184 | NUCB1 | nucleobindin 1 | Expression in | Up in |
| FL | | | | FL to DLBCL | Transformed |
| | | | | transformation | DLBCL |
| ABC VS | NM_000698 | ALOX5 | arachidonate 5- | Signature | Uncertain in |
| GC | | | lipoxygenase | genes | Common |
| DLBCL; | | | | common to | Genes; Down |
| DLBCL Vs. | | | | both Shipp | in |
| FL | | | | and Alizadeh; | Transformed |
| | | | | Expression in | DLBCL |
| | | | | FL to DLBCL | |
| | | | | transformation | |
| ABC VS | BC011857 | IGHM | immunoglobulin heavy | Wright | Low in GC |
| GC | | | constant mu | predictor; | DLBCL; Low |
| DLBCL; | | | | Expression in | in MLBCL; |
| MLBCL vs. | | | | FL to DLBCL | Down in |
| DLBCL; | | | | transformation | Transformed |
| DLBCL Vs. | | | | | DLBCL |
| FL | | | | | |
| DLBCL Vs. | NM_001831 | CLU | clusterin (complement | Genes | Down in |
| FL | | | lysis inhibitor, SP-40,40, | specific to | DLBCL, Up in |
| | | | sulfated glycoprotein 2, | either | FL; Down in |
| | | | testosterone-repressed | DLBCL or | Transformed |
| | | | prostate message 2, | FL; | DLBCL |
| | | | apolipoprotein J) | Expression in | |
| | | | | FL to DLBCL | |
| | | | | transformation | |
| DLBCL Vs. | NM_006472 | TXNIP | thioredoxin interacting | Genes | Down in |
| FL | | | protein | specific to | DLBCL, Up in |
| | | | | either | FL; Down in |
| | | | | DLBCL or | Transformed |
| | | | | FL; | DLBCL |
| | | | | Expression in | |
| | | | | FL to DLBCL | |
| | | | | transformation | |
| Survival; | NM_002046 | GAPD | glyceraldehyde-3- | Genes | Down in |
| DLBCL Vs. | | | phosphate | Correlated | Cured; Up in |
| FL | | | dehydrogenase | with Survival; | Fatal; Up in |
| | | | | Expression in | Transformed |
| | | | | FL to DLBCL | DLBCL |
| | | | | transformation | |
| ABC VS | NM_002648 | PIM1 | pim-1 oncogene | Wright | Low in GC |
| GC | | | | predictor; | DLBCL; Up in |
| DLBCL; | | | | Expression in | Transformation |
| DLBCL Vs. | | | | FL to DLBCL | |
| FL | | | | transformation | |
| DLBCL Vs. | NM_002162 | ICAM3 | intercellular adhesion | Expression in | Down in |
| FL; DLBCL | | | molecule 3 | FL to DLBCL | Transformed |
| vs. MCL | | | | transformation; | DLBCL; |
| | | | | Strong | Down in |
| | | | | Classifier | DLBCL; Up in |
| | | | | Separating | MCL |
| | | | | MCLs and | |
| | | | | DLBCLs | |
| DLBCL Vs. | NM_000598 | IGFBP3 | insulin-like growth | Expression in | Down in |
| FL | | | factor binding protein 3 | FL to DLBCL | Transformed |
| | | | | transformation | DLBCL |
| DLBCL Vs. | NM_000034 | ALDOA | aldolase A, fructose- | Genes | Up in DLBCL; |
| FL | | | bisphosphate | specific to | Down in FL; |
| | | | | either | Up in |
| | | | | DLBCL or | Transformation |
| | | | | FL; | |
| | | | | Expression in | |
| | | | | FL to DLBCL | |
| | | | | transformation | |
| DLBCL Vs. | NM_005998 | CCT3 | chaperonin containing | Genes | Up in DLBCL; |
| FL | | | TCP1, subunit 3 | specific to | Down in FL; |
| | | | (gamma) | either | Up in |
| | | | | DLBCL or | Transformation |
| | | | | FL; | |
| | | | | Expression in | |
| | | | | FL to DLBCL | |
| | | | | transformation | |
| FL vs MCL | NM_024728 | C7orf10 | chromosome 7 open | | up in FL vs |
| | | | reading frame 10 | | MCL (4.5) |
| CLL/SLL vs | BC046632 | FLJ21195 | protein related to DAN | | up in FL vs |
| FL | | | and cerberus | | SLL (4.1) |
| DLBCL Vs. | NM_004619 | TRAF5 | TNF receptor-associated | Genes | Down in |
| FL; MLBCL | | | factor 5 | specific to | DLBCL, Up in |
| vs. DLBCL | | | | either | FL; Low in |
| | | | | DLBCL or | MLBCL |
| | | | | FL | |
| Survival; | NM_021603 | FXYD2 | FXYD domain | Genes | Up in cured; |
| DLBCL Vs. | | | containing ion transport | Correlated | Down in fatal; |
| FL | | | regulator 2 | with Survival; | Up in |
| | | | | Expression in | Transformed |
| | | | | FL to DLBCL | DLBCL |
| | | | | transformation | |
| DLBCL Vs. | NM_001901 | CTGF | connective tissue growth | Expression in | Down in |
| FL | | | factor | FL to DLBCL | Transformed |
| | | | | transformation | DLBCL |
| FL | NM_024713 | FLJ22557 | hypothetical protein | | up in FL (6.5) |
| | | | FLJ22557 | | |
| DLBCL Vs. | NM_004907 | ETR101 | immediate early protein | Expression in | Down in |
| FL | | | | FL to DLBCL | Transformed |
| | | | | transformation | DLBCL |
| DLBCL Vs. | NM_003070 | SMARCA2 | SWI/SNF related, matrix | Expression in | Down in |
| FL | | | associated, actin | FL to DLBCL | Transformed |
| | | | dependent regulator of | transformation | DLBCL |
| | | | chromatin, subfamily a, | | |
| | | | member 2 | | |
| DLBCL Vs. | NM_012203 | GRHPR | glyoxylate | Expression in | Up in |
| FL | | | reductase/hydroxypyruvate | FL to DLBCL | Transformation |
| | | | reductase | transformation | |
| CLL/SLL vs | NM_014686 | KIAA0355 | KIAA0355 | | down in FL vs |
| FL | | | | | SLL (−4.5) |
| FL | AB029034 | PHF8 | PHD finger protein 8 | | down in FL (−10.8) |
| FL | BC001077 | LOC87769 | hypothetical protein | | down in FL (−4.9) |
| | | | BC004360 | | |
| FL | NM_024319 | C1orf35 | chromosome 1 open | | down in FL (−4.4); |
| | | | reading frame 35 | | down in |
| | | | | | FL vs SLL (−5) |
| FL vs MCL | NM_015670 | SENP3 | SUMO1/sentrin/SMT3 | | up in FL vs |
| | | | specific protease 3 | | MCL |

TABLE 8
An HCP set specific for HL, according to one embodiment of the invention

| Feature | Accession | Symbol | Name | Notes | Level |
|---|---|---|---|---|---|
| Survival | NM_001618 | ADPRT | ADP-ribosyltransferase | Genes with | Down in Fatal; |
| (HL) | | | (NAD+; poly (ADP- | prognostic | Up in Cured |
| | | | ribose) polymerase) | value | |
| Survival | NM_000038 | APC | adenomatosis polyposis | Genes with | Down in Fatal; |
| (HL) | | | coli | prognostic | Up in Cured |
| | | | | value | |
| Survival | NM_001226 | CASP6 | caspase 6, apoptosis- | Genes with | Down in Fatal; |
| (HL) | | | related cysteine protease | prognostic | Up in Cured |
| | | | | value | |
| Survival | NM_001795 | CDH5 | cadherin 5, type 2, VE- | Genes with | Up in Fatal; |
| (HL) | | | cadherin (vascular | prognostic | Down in Cured |
| | | | epithelium) | value | |
| Survival | NM_058197 | CDKN2A | cyclin-dependent kinase | Genes with | Down in Fatal; |
| (HL) | | | inhibitor 2A (melanoma, | prognostic | Up in Cured |
| | | | p16, inhibits CDK4) | value | |
| Survival | NM_005215 | DCC | deleted in colorectal | Genes with | Down in Fatal; |
| (HL) | | | carcinoma | prognostic | Up in Cured |
| | | | | value | |
| Survival | NM_004119 | FLT3 | fms-related tyrosine | Genes with | Down in Fatal; |
| (HL) | | | kinase 3 | prognostic | Up in Cured |
| | | | | value | |
| HL vs. | NM_002086 | GRB2 | growth factor receptor- | Differentially | Up only in HL |
| ALCL | | | bound protein 2 | regulated | |
| | | | | between | |
| | | | | ALCL and HL | |
| HL vs. | NM_176783 | PSME1 | proteasome (prosome, | Differentially | Up only in |
| ALCL | | | macropain) activator | regulated | ALCL |
| | | | subunit 1 (PA28 | between | |
| | | | aHCPha) | ALCL and HL | |
| HL vs. | NM_002961 | S100A4 | S100 calcium binding | Differentially | Up only in HL |
| ALCL | | | protein A4 (calcium | regulated | |
| | | | protein, calvasculin, | between | |
| | | | metastasin, murine | ALCL and HL | |
| | | | placental homolog) | | |
| HL | NM_000698 | ALOX5 | arachidonate 5- | Genes unique | Down in HL |
| Signature | | | lipoxygenase | to | |
| | | | | Reed/Sternberg | |
| | | | | cells | |
| HL | NM_001715 | BLK | B lymphoid tyrosine | Genes unique | Down in HL |
| Signature | | | kinase | to | |
| | | | | Reed/Sternberg | |
| | | | | cells | |
| HL | NM_002987 | CCL17 | chemokine (C-C motif) | Genes unique | Up in HL |
| Signature | | | ligand 17 | to | |
| | | | | Reed/Sternberg | |
| | | | | cells | |
| HL | NM_001783 | CD79A | CD79A antigen | Genes unique | Down in HL |
| Signature | | | (immunoglobulin- | to | |
| | | | associated aHCPha) | Reed/Sternberg | |
| | | | | cells | |
| HL | NM_000626 | CD79B | CD79B antigen | Genes unique | Down in HL |
| Signature | | | (immunoglobulin- | to | |
| | | | associated beta) | Reed/Sternberg | |
| | | | | cells | |
| HL | NM_182908 | DHRS2 | dehydrogenase/reductase | Genes unique | Up in HL |
| Signature | | | (SDR family) member 2 | to | |
| | | | | Reed/Sternberg | |
| | | | | cells | |
| HL | NM_004434 | EML1 | echinoderm microtubule | Genes unique | Up in HL |
| Signature | | | associated protein like 1 | to | |
| | | | | Reed/Sternberg | |
| | | | | cells | |
| HL | NM_006495 | EVI2B | ecotropic viral | Genes unique | Down in HL |
| Signature | | | integration site 2B | to | |
| | | | | Reed/Sternberg | |
| | | | | cells | |
| HL | NM_013451 | FER1L3 | fer-1-like 3, myoferlin | Genes unique | Up in HL |
| Signature | | | (C. elegans) | to | |
| | | | | Reed/Sternberg | |
| | | | | cells | |
| HL | NM_002048 | GAS1 | growth arrest-specific 1 | Genes unique | Up in HL |
| Signature | | | | to | |
| | | | | Reed/Sternberg | |
| | | | | cells | |
| HL | BM722299 | H2AFB | H2A histone family, | Genes unique | Up in HL |
| Signature | | | member B | to | |
| | | | | Reed/Sternberg | |
| | | | | cells | |
| HL | NM_002167 | ID3 | inhibitor of DNA | Genes unique | Down in HL |
| Signature | | | binding 3, dominant | to | |
| | | | negative helix-loop-helix | Reed/Sternberg | |
| | | | protein | cells | |
| HL | BC011857 | IGHM | Immunoglobulin heavy | Genes unique | Down in HL |
| Signature | | | constant mu | to | |
| | | | | Reed/Sternberg | |
| | | | | cells | |
| HL | NM_005933 | MLL | myeloid/lymphoid or | Genes unique | Down in HL |
| Signature | | | mixed-lineage leukemia | to | |
| | | | (trithorax homolog, | Reed/Sternberg | |
| | | | Drosophila) | cells | |
| HL | NM_152866 | MS4A1 | membrane-spanning 4- | Genes unique | Down in HL |
| Signature | | | domains, subfamily A, | to | |
| | | | member 1 | Reed/Sternberg | |
| | | | | cells | |
| HL | AB033114 | MTSG1 | mitochondrial tumor | Genes unique | Up in HL |
| Signature | | | suppressor gene 1 | to | |
| | | | | Reed/Sternberg | |
| | | | | cells | |
| HL | NM_004289 | NFE2L3 | nuclear factor (erythroid- | Genes unique | Up in HL |
| Signature | | | derived 2)-like 3 | to | |
| | | | | Reed/Sternberg | |
| | | | | cells | |
| HL | NM_020992 | PDLIM1 | PDZ and LIM domain 1 | Genes unique | Down in HL |
| Signature | | | (elfin) | to | |
| | | | | Reed/Sternberg | |
| | | | | cells | |
| HL | NM_002661 | PLCG2 | phospholipase C, gamma | Genes unique | Down in HL |
| Signature | | | 2 (phosphatidylinositol- | to | |
| | | | specific) | Reed/Sternberg | |
| | | | | cells | |
| HL | NM_006115 | PRAME | preferentially expressed | Genes unique | Up in HL |
| Signature | | | antigen in melanoma | to | |
| | | | | Reed/Sternberg | |
| | | | | cells | |
| HL | NM_002838 | PTPRC | protein tyrosine | Genes unique | Down in HL |
| Signature | | | phosphatase, receptor | to | |
| | | | type, C | Reed/Sternberg | |
| | | | | cells | |
| HL | NM_015055 | SWAP70 | SWAP-70 protein | Genes unique | Down in HL |
| Signature | | | | to | |
| | | | | Reed/Sternberg | |
| | | | | cells | |
| HL | NM_004665 | VNN2 | vanin 2 | Genes unique | Down in HL |
| Signature | | | | to | |
| | | | | Reed/Sternberg | |
| | | | | cells | |
| Signature; | NM_003254 | TIMP1 | tissue inhibitor of | Genes unique | Disagreement: Up |
| HL vs. | | | metalloproteinase 1 | to | in HL; Up |
| ALCL; | | | (erythroid potentiating | Reed/Sternberg | only in ALCL; |
| Survival | | | activity, collagenase | cells; | Up in Fatal; |
| | | | inhibitor) | Differentially | Down in Cured |
| | | | | regulated | |
| | | | | between | |
| | | | | ALCL and | |
| | | | | HL; Genes | |
| | | | | with | |
| | | | | prognostic | |
| | | | | value | |
| Survival | NM_024408 | NOTCH2 | Notch homolog 2 | Genes with | Down in Fatal; |
| (HL) | | | (Drosophila) | prognostic | Up in Cured |
| | | | | value | |
| Survival | NM_000314 | PTEN | phosphatase and tensin | Genes with | Down in Fatal; |
| (HL) | | | homolog (mutated in | prognostic | Up in Cured |
| | | | multiple advanced | value | |
| | | | cancers 1) | | |
| Survival | NM_003005 | SEHCP | selectin P (granule | Genes with | Up in Fatal; |
| (HL) | | | membrane protein | prognostic | Down in Cured |
| | | | 140 kDa, antigen CD62) | value | |
| Survival | NM_003810 | TNFSF10 | tumor necrosis factor | Genes with | Down in Fatal; |
| (HL) | | | (ligand) superfamily, | prognostic | Up in Cured |
| | | | member 10 | value | |
| HL vs. | NM_005178 | BCL3 | B-cell CLL/lymphoma 3 | Diagnostic | Up only in |
| ALCL | | | | Marker | ALCL |
| HL vs. | NM_000485 | APRT | adenine | Differentially | Up in Both HL |
| ALCL | | | phosphoribosyltransferase | regulated | and ALCL |
| | | | | between | |
| | | | | ALCL and HL | |
| HL vs. | NM_001728 | BSG | basigin (OK blood | Differentially | Up only in |
| ALCL | | | group) | regulated | ALCL |
| | | | | between | |
| | | | | ALCL and HL | |
| HL vs. | NM_006763 | BTG2 | BTG family, member 2 | Differentially | Up in Both HL |
| ALCL | | | | regulated | and ALCL |
| | | | | between | |
| | | | | ALCL and HL | |
| HL vs. | NM_001743 | CALM2 | calmodulin 2 | Differentially | Up in Both HL |
| ALCL | | | (phosphorylase kinase, | regulated | and ALCL |
| | | | delta) | between | |
| | | | | ALCL and HL | |
| HL vs. | NM_033306 | CASP4 | caspase 4, apoptosis- | Differentially | Up only in |
| ALCL | | | related cysteine protease | regulated | ALCL |
| | | | | between | |
| | | | | ALCL and HL | |
| HL vs. | NM_005340 | HINT1 | histidine triad nucleotide | Differentially | Up only in |
| ALCL | | | binding protein 1 | regulated | ALCL |
| | | | | between | |
| | | | | ALCL and HL | |
| HL vs. | NM_002228 | JUN | v-jun sarcoma virus 17 | Differentially | Up only in HL |
| ALCL | | | oncogene homolog | regulated | |
| | | | (avian) | between | |
| | | | | ALCL and HL | |
| HL vs. | NM_006191 | PA2G4 | proliferation-associated | Differentially | Up in Both HL |
| ALCL | | | 2G4, 38 kDa | regulated | and ALCL |
| | | | | between | |
| | | | | ALCL and HL | |
| HL vs. | NM_030666 | SERPINB1 | serine (or cysteine) | Differentially | Up in Both HL |
| ALCL | | | proteinase inhibitor, | regulated | and ALCL |
| | | | clade B (ovalbumin), | between | |
| | | | member 1 | ALCL and HL | |
| HL vs. | NM_003955 | SOCS3 | suppressor of cytokine | Differentially | Up only in |
| ALCL | | | signaling 3 | regulated | ALCL |
| | | | | between | |
| | | | | ALCL and HL | |
| HL vs. | NM_003254 | TIMP1 | tissue inhibitor of | Genes unique | Disagreement: Up |
| ALCL | | | metalloproteinase 1 | to | in HL; Up |
| | | | (erythroid potentiating | Reed/Sternberg | only in ALCL; |
| | | | activity, collagenase | cells; | Up in Fatal; |
| | | | inhibitor) | Differentially | Down in Cured |
| | | | | regulated | |
| | | | | between | |
| | | | | ALCL and | |
| | | | | HL; Genes | |
| | | | | with | |
| | | | | prognostic | |
| | | | | value | |

TABLE 9
An HCP set specific for MCL, according to one embodiment of the invention

| Feature | Accession | Symbol | Name | Notes | Level |
|---|---|---|---|---|---|
| MCL vs. | NM_001675 | ATF4 | activating transcription | High in | Up in MCL- |
| MCL-BV | | | factor 4 (tax-responsive | Aggressive | BV vs. MCL |
| | | | enhancer element B67) | Blast Variant | |
| MCL vs. | NM_001826 | CKS1B | CDC28 protein kinase | High in | Up in MCL- |
| MCL-BV | | | regulatory subunit 1B | Aggressive | BV vs. MCL |
| | | | | Blast Variant; | |
| | | | | RT-Confirmed | |
| MCL vs. | NM_001831 | CLU | clusterin (complement | RT-Confirmed | Up in MCL- |
| MCL-BV | | | lysis inhibitor, SP- | | BV vs. MCL |
| | | | 40,40, sulfated | | |
| | | | glycoprotein 2, | | |
| | | | testosterone-repressed | | |
| | | | prostate message 2, | | |
| | | | apolipoprotein J) | | |
| MCL vs. | NM_001344 | DAD1 | defender against cell | RT-Confirmed | Up in MCL- |
| MCL-BV | | | death 1 | | BV vs. MCL |
| MCL vs. | NM_005243 | EWSR1 | Ewing sarcoma | RT-Confirmed | Up in MCL- |
| MCL-BV | | | breakpoint region 1 | | BV vs. MCL |
| MCL vs. | NM_006769 | LMO4 | LIM domain only 4 | High in | Up in MCL- |
| MCL-BV | | | | Aggressive | BV vs. MCL |
| | | | | Blast Variant; | |
| | | | | RT-Confirmed | |
| MCL vs. | NM_005582 | LY64 | lymphocyte antigen 64 | High in | Up in MCL- |
| MCL-BV | | | homolog, | Aggressive | BV vs. MCL |
| | | | radioprotective 105 kDa | Blast Variant; | |
| | | | (mouse) | RT-Confirmed | |
| MCL vs. | NM_004689 | MTA1 | metastasis associated 1 | RT-Confirmed | Up in MCL- |
| MCL-BV | | | | | BV vs. MCL |
| MCL vs. | NM_002466 | MYBL2 | v-myb myeloblastosis | RT-Confirmed | Up in MCL- |
| MCL-BV | | | viral oncogene | | BV vs. MCL |
| | | | homolog (avian)-like 2 | | |
| MCL vs. | NM_002648 | PIM1 | pim-1 oncogene | High in | Up in MCL- |
| MCL-BV | | | | Aggressive | BV vs. MCL |
| | | | | Blast Variant; | |
| | | | | RT-Confirmed | |
| MCL vs. | NM_003403 | YY1 | YY1 transcription | High in | Up in MCL- |
| MCL-BV | | | factor | Aggressive | BV vs. MCL |
| | | | | Blast Variant; | |
| | | | | RT-Confirmed | |
| MCL | NM_053056 | CCND1 | cyclin D1 (PRAD1: | RT-PCR | Up in MCL; |
| Signature | | | parathyroid | Comparison of | Down in |
| | | | adenomatosis 1) | CLL and MCL | DLBCL; Up |
| | | | | | in MCL; up |
| | | | | | in MCL |
| MCL | NM_000633 | BCL2 | B-cell CLL/lymphoma 2 | Gene | High in MCL |
| Signature | | | | Expression | and DLBCL |
| | | | | Analysis in | cell lines; |
| | | | | MCL cell lines; | Down in |
| | | | | RT-PCR | MCL & |
| | | | | Comparison of | MZL, Up in |
| | | | | CLL, MCL & | CLL |
| | | | | MZL | |
| MCL | NM_002162 | ICAM3 | intercellular adhesion | Strong | Down in |
| Signature | | | molecule 3 | Classifier | DLBCL; Up |
| | | | | Separating | in MCL |
| | | | | MCLs and | |
| | | | | DLBCLs | |
| Survival; | NM_002592 | PCNA | proliferating cell | Proliferation | High in Short |
| MCL vs. | | | nuclear antigen | Signature | Survival; Up |
| MCL-BV | | | | | in MCL-BV |
| | | | | | vs. MCL |
| MCL | NM_000698 | ALOX5 | arachidonate 5- | | up in MCL |
| | | | lipoxygenase | | (5.8) |
| MCL vs. | NM_005104 | BRD2 | bromodomain | High in | Up in MCL- |
| MCL-BV | | | containing 2 | Aggressive | BV vs. MCL |
| | | | | Blast Variant | |
| MCL vs. | NM_001728 | BSG | basigin (OK blood | High in | Up in MCL- |
| MCL-BV | | | group) | Aggressive | BV vs. MCL |
| | | | | Blast Variant | |
| MCL vs. | NM_001469 | G22P1 | thyroid autoantigen | High in | Up in MCL- |
| MCL-BV | | | 70 kDa (Ku antigen) | Aggressive | BV vs. MCL |
| | | | | Blast Variant | |
| MCL vs. | NM_031844 | HNRPU | heterogeneous nuclear | High in | Up in MCL- |
| MCL-BV | | | ribonucleoprotein U | Aggressive | BV vs. MCL |
| | | | (scaffold attachment | Blast Variant | |
| | | | factor A) | | |
| MCL vs. | NM_002460 | IRF4 | interferon regulatory | High in | Up in MCL- |
| MCL-BV | | | factor 4 | Aggressive | BV vs. MCL |
| | | | | Blast Variant | |
| MCL vs. | NM_006152 | LRMP | lymphoid-restricted | High in | Up in MCL- |
| MCL-BV | | | membrane protein | Aggressive | BV vs. MCL |
| | | | | Blast Variant | |
| MCL vs. | NM_006819 | STIP1 | stress-induced- | High in | Up in MCL- |
| MCL-BV | | | phosphoprotein 1 | Aggressive | BV vs. MCL |
| | | | (Hsp70/Hsp90- | Blast Variant | |
| | | | organizing protein) | | |
| MCL | NM_001092 | ABR | active BCR-related | Signature genes | Down in |
| Signature | | | gene | common to both | DLBCL; Up |
| | | | | Shipp and | in MCL |
| | | | | Alizadeh; | |
| | | | | Strong | |
| | | | | Classifier | |
| | | | | Separating | |
| | | | | MCLs and | |
| | | | | DLBCLs | |
| MCL | NM_156039 | CSF3R | colony stimulating | Strong | Down in |
| Signature | | | factor 3 receptor | Classifier | DLBCL; Up |
| | | | (granulocyte) | Separating | in MCL |
| | | | | MCLs and | |
| | | | | DLBCLs | |
| MCL | NM_004941 | DHX8 | DEAH (Asp-Glu-Ala- | Strong | Down in |
| Signature | | | His) box polypeptide 8 | Classifier | DLBCL; Up |
| | | | | Separating | in MCL |
| | | | | MCLs and | |
| | | | | DLBCLs | |
| MCL | BC025340 | MGC39372 | hypothetical protein | | up in MCL |
| | | | MGC39372 | | (8.4); down |
| | | | | | in FL vs |
| | | | | | MCL (−13.6); |
| | | | | | up in MCL vs |
| | | | | | SLL (6.3) |
| MCL | NM_004513 | IL16 | interleukin 16 | | up in FL vs |
| | | | (lymphocyte | | MCL (4.9); |
| | | | chemoattractant factor) | | down in |
| | | | | | MCL vs SLL |
| | | | | | (−7.8) |
| MCL vs | NM_002466 | MYBL2 | v-myb myeloblastosis | | up in MCL vs |
| CLL/SLL | | | viral oncogene | | SLL (5.1) |
| | | | homolog (avian)-like 2 | | |
| Signature; | NM_000075 | CDK4 | cyclin-dependent | RT-PCR | Up in MCL; |
| MCL vs. | | | kinase 4 | Comparison of | Up in MCL- |
| MCL-BV | | | | CLL and MCL; | BV vs. MCL |
| | | | | RT confirmed | |
| CLL/SLL | AB018263 | KIAA0720 | putative NFkB | | Up in MCL |
| vs MCL | | | activating protein | | vs SLL (4.3) |
| FL; MCL | NM_000424 | KRT5 | keratin 5 | | down in FL (−5.3); |
| | | | (epidermolysis bullosa | | down in |
| | | | simplex, Dowling- | | MCL (−4) |
| | | | Meara/Kobner/Weber- | | |
| | | | Cockayne types) | | |
| FL vs | AB037771 | USP53 | ubiquitin specific | | up in FL vs |
| MCL | | | protease 53 | | MCL (4.2) |
| MCL vs | NM_032873 | KIAA1959 | nm23-phosphorylated | | down in |
| CLL/SLL | | | unknown substrate | | MCL vs SLL |
| | | | | | (−5.3) |
| FL vs | NM_000418 | IL4R | interleukin 4 receptor | | up in FL vs |
| MCL | | | | | MCL (5.4) |
| MCL vs | NM_000418 | IL4R | interleukin 4 receptor | | down in |
| CLL/SLL | | | | | MCL vs SLL |
| | | | | | (−7.1) |
| MCL vs | NM_023037 | 13CDNA73 | hypothetical protein | | MCL vs SLL |
| CLL/SLL | | | CG003 | | (−7.6) |
| MCL | AF509494 | KIAA1407 | KIAA1407 protein | | up in MCL |
| | | | | | (10) |
| FL vs | NM_001781 | CD69 | CD69 antigen (p60, | | down in FL |
| MCL | | | early T-cell activation | | vs MCL (−4.1) |
| | | | antigen) | | |
| MCL vs | NM_030926 | ITM2C | integral membrane | | up in MCL vs |
| SLL | | | protein 2C | | SLL |
| MCL | AF331856 | DNMT3A | DNA (cytosine-5-)- | | down in FL |
| | | | methyltransferase 3 | | vs MCL (−8); |
| | | | aHCPha | | up in MCL vs |
| | | | | | SLL (5.2) |
| FL vs | NM_000405 | GM2A | GM2 ganglioside | | down in FL |
| MCL | | | activator | | vs MCL (−4.4) |
| CLL/SLL | NM_000483 | APOC2 | apolipoprotein C-II | | up in MCL vs |
| vs MCL | | | | | SLL (5.6) |
| FL vs | NM_002228 | JUN | v-jun sarcoma virus 17 | | down in FL |
| MCL | | | oncogene homolog | | vs MCL (−4.6) |
| | | | (avian) | | |
| FL vs | NM_006889 | CD86 | CD86 antigen (CD28 | | up in FL vs |
| MCL | | | antigen ligand 2, B7-2 | | MCL (7.9) |
| | | | antigen) | | |
| CLL/SLL | NM_003480 | MFAP5 | microfibrillar | | up in MCL vs |
| vs MCL | | | associated protein 5 | | CLL/SLL |
| | | | | | (4.2) |
| MCL | NM_181430 | ILF1 | interleukin enhancer | Strong | Down in |
| Signature | | | binding factor 1 | Classifier | DLBCL; Up |
| | | | | Separating | in MCL |
| | | | | MCLs and | |
| | | | | DLBCLs | |
| MCL | NM_003222 | TFAP2C | transcription factor AP- | | down in |
| | | | 2 gamma (activating | | MCL (−8.2) |
| | | | enhancer binding | | |
| | | | protein 2 gamma) | | |
| FL vs | NM_006164 | NFE2L2 | nuclear factor | | up in FL vs |
| MCL | | | (erythroid-derived 2)- | | MCL (4.1) |
| | | | like 2 | | |
| MCL | NM_004235 | KLF4 | Kruppel-like factor 4 | | up in MCL |
| | | | (gut) | | (5) |
| MCL vs | NM_003651 | CSDA | cold shock domain | | down in |
| CLL/SLL | | | protein A | | MCL vs SLL |
| | | | | | (−4.4) |
| MCL | NM_001888 | CRYM | crystallin, mu | | up in MCL |
| | | | | | (8.5); down |
| | | | | | in FL vs |
| | | | | | MCL (−7.3); |
| | | | | | up in MCL vs |
| | | | | | SLL (9.3) |
| MCL | NM_001675 | ATF4 | activating transcription | | up in MCL |
| | | | factor 4 (tax-responsive | | (4.3) |
| | | | enhancer element B67) | | |
| MCL | NM_003804 | RIPK1 | receptor (TNFRSF)- | | down in |
| | | | interacting serine- | | MCL (−4.2) |
| | | | threonine kinase 1 | | |
| MCL | NM_004924 | ACTN4 | actinin, aHCPha 4 | | up in MCL |
| | | | | | (4.5) |
| FL vs | NM_018842 | LOC55971 | insulin receptor | | down in FL |
| MCL | | | tyrosine kinase | | vs MCL (−8.4) |
| | | | substrate | | |
| MCL | NM_002483 | CEACAM6 | carcinoembryonic | | down in |
| | | | antigen-related cell | | MCL (−4.4); |
| | | | adhesion molecule 6 | | up in FL vs |
| | | | (non-specific cross | | MCL (4.7) |
| | | | reacting antigen) | | |
| FL vs | NM_001640 | APEH | N-acylaminoacyl- | | down in |
| MCL | | | peptide hydrolase | | MCL (−6.5); |
| | | | | | up in FL vs |
| | | | | | MCL (6) |
| FL vs | NM_006475 | POSTN | periostin, osteoblast | | Up in FL vs |
| MCL | | | specific factor | | MCL (4) |
| MCL | NM_000700 | ANXA1 | annexin A1 | | down in |
| | | | | | MCL (−4.1) |
| FL vs | NM_021813 | BACH2 | BTB and CNC | | up in FL vs |
| MCL | | | homology 1, basic | | MCL (5.5) |
| | | | leucine zipper | | |
| | | | transcription factor 2 | | |
| DLBCL | NM_053056 | CCND1 | cyclin D1 (PRAD1: | Strong | Down in |
| vs. MCL | | | parathyroid | Classifier | DLBCL; Up |
| | | | adenomatosis 1) | Separating | in MCL |
| | | | | MCLs and | |
| | | | | DLBCLs | |
| CLL vs. | NM_002467 | MYC | v-myc | RT-PCR | High in CLL |
| MCL | | | myelocytomatosis viral | analysis shows | |
| | | | oncogene homolog | up regulation in | |
| | | | (avian) | CLL | |
| CLL/SLL | NM_002933 | RNASE1 | ribonuclease, RNase A | | down in |
| vs MCL | | | family, 1 (pancreatic) | | MCL vs SLL |
| | | | | | (−5.4) |
| MCL | NM_022829 | SLC13A3 | solute carrier family 13 | | up in MCL |
| | | | (sodium-dependent | | (4.9) |
| | | | dicarboxylate | | |
| | | | transporter), member 3 | | |
| MCL | NM_003339 | UBE2D2 | ubiquitin-conjugating | | up in MCL |
| | | | enzyme E2D 2 | | (4.4) |
| | | | (UBC4/5 homolog, | | |
| | | | yeast) | | |
| ABC VS | NM_001092 | ABR | active BCR-related | Signature genes | Uncertain in |
| GC | | | gene | common to both | Common |
| DLBCL; | | | | Shipp and | Genes; Down |
| DLBCL | | | | Alizadeh; | in DLBCL; |
| vs. MCL | | | | Strong | Up in MCL |
| | | | | Classifier | |
| | | | | Separating | |
| | | | | MCLs and | |
| | | | | DLBCLs | |
| DBFCL | NM_002162 | ICAM3 | intercellular adhesion | Expression in | Down in |
| Vs. FL; | | | molecule 3 | FL to DLBCL | Transformed |
| DLBCL | | | | transformation; | DLBCL; |
| vs. MCL | | | | Strong | Down in |
| | | | | Classifier | DLBCL; Up |
| | | | | Separating | in MCL |
| | | | | MCLs and | |
| | | | | DLBCLs | |
| FL vs | NM_024728 | C7orf10 | chromosome 7 open | | up in FL vs |
| MCL | | | reading frame 10 | | MCL (4.5) |
| MCL | NM_025263 | PRR3 | proline rich 3 | | up in MCL |
| | | | | | (4.3) |
| DLBCL | NM_019841 | TRPV5 | transient receptor | Strong | Down in |
| vs. MCL; | | | potential cation | Classifier | DLBCL; Up |
| CD5+/− | | | channel, subfamily V, | Separating | in MCL; |
| DLBCL | | | member 5 | MCLs and | Down in |
| | | | | DLBCLs and | CD5+; Up in |
| | | | | CD5+ from | CD5− |
| | | | | CD5− DLBCLs | |
| MCL | NM_024713 | FLJ22557 | hypothetical protein | | up in MCL |
| | | | FLJ22557 | | (15.7) |
| MCL | AK092000 | SLC3A1 | solute carrier family 3 | | up in MCL |
| | | | (cystine, dibasic and | | (4.3) |
| | | | neutral amino acid | | |
| | | | transporters, activator | | |
| | | | of cystine, dibasic and | | |
| | | | neutral amino acid | | |
| | | | transport), member 1 | | |
| MCL | NM_022436 | ABCG5 | ATP-binding cassette, | | down in |
| | | | sub-family G | | MCL (−4.1) |
| | | | (WHITE), member 5 | | |
| | | | (sterolin 1) | | |
| MCL | NM_004475 | FLOT2 | flotilline 2 | Strong | Down in |
| Signature | | | | Classifier | DLBCL; Up |
| | | | | Separating | in MCL |
| | | | | MCLs and | |
| | | | | DLBCLs | |
| DLBCL | NM_134269 | SMTN | smoothelin | Strong | Down in |
| vs. MCL | | | | Classifier | DLBCL; Up |
| | | | | Separating | in MCL |
| | | | | MCLs and | |
| | | | | DLBCLs | |
| CLL vs. | NM_000075 | CDK4 | cyclin-dependent | MCL, CLL | High in CLL |
| MCL | | | kinase 4 | Signature&CLL | |
| | | | | Vs. MCL | |
| | | | | Distinguisher | |
| DLBCL | NM_004941 | DHX8 | DEAH (Asp-Glu-Ala- | Strong | Down in |
| vs. MCL | | | His) box polypeptide 8 | Classifier | DLBCL; Up |
| | | | | Separating | in MCL |
| | | | | MCLs and | |
| | | | | DLBCLs | |
| DLBCL | NM_004475 | FLOT2 | flotillin 2 | Strong | Down in |
| vs. MCL | | | | Classifier | DLBCL; Up |
| | | | | Separating | in MCL |
| | | | | MCLs and | |
| | | | | DLBCLs | |
| DLBCL | NM_181430 | ILF1 | interleukin enhancer | Strong | Down in |
| vs. MCL | | | binding factor 1 | Classifier | DLBCL; Up |
| | | | | Separating | in MCL |
| | | | | MCLs and | |
| | | | | DLBCLs | |
| DLBCL | NM_156039 | CSF3R | colony stimulating | Strong | Down in |
| vs. MCL | | | factor 3 receptor | Classifier | DLBCL; Up |
| | | | (granulocyte) | Separating | in MCL |
| | | | | MCLs and | |
| | | | | DLBCLs | |
| DLBCL | NM_000277 | PAH | phenylalanine | Strong | Down in |
| vs. MCL | | | hydroxylase | Classifier | DLBCL; Up |
| | | | | Separating | in MCL |
| | | | | MCLs and | |
| | | | | DLBCLs | |
| MCL | BC022095 | C6orf110 | chromosome 6 open | | up in MCL |
| | | | reading frame 110 | | (4.8) |
| MCL | NM_031305 | ARHGAP24 | Rho GTPase activating | | up in MCL |
| | | | protein 24 | | (5.6) |
| MCL | AB029034 | PHF8 | PHD finger protein 8 | | down in |
| | | | | | MCL (−5.8) |
| MCL | NM_198243 | ASB7 | ankyrin repeat and | | down in |
| | | | SOCS box-containing 7 | | MCL (−6) |
| MCL | NM_016570 | PTX1 | PTX1 protein | | up in FL vs |
| | | | | | MCL (5.8); |
| | | | | | down in |
| | | | | | MCL vs SLL |
| | | | | | (−8.8) |
| MCL | BC001077 | LOC87769 | hypothetical protein | | down in |
| | | | BC004360 | | MCL (−4.9) |
| MCL | NM_138379 | LOC91937 | hypothetical protein | | down in |
| | | | BC008988 | | MCL (−4.1); |
| | | | | | down in |
| | | | | | MCL vs SLL |
| | | | | | (−4.3) |
| FL vs | NM_015670 | SENP3 | SUMO1/sentrin/SMT3 | | up in FL vs |
| MCL | | | specific protease 3 | | MCL |
| MCL | BX647445 | GTF2H2 | general transcription | | up in MCL |
| | | | factor IIH, polypeptide | | (5.9) |
| | | | 2, 44 kDa | | |
| MCL | NM_030956 | TLR10 | toll-like receptor 10 | Molecular | Up in MCL |
| Signature | | | | Diagnosis | vs. |
| | | | | | CLL/DLBCL |
| MCL | NM_000277 | PAH | phenylalanine | Strong | Down in |
| Signature | | | hydroxylase | Classifier | DLBCL; Up |
| | | | | Separating | in MCL |
| | | | | MCLs and | |
| | | | | DLBCLs | |
| MCL | NM_134269 | SMTN | smoothelin | Strong | Down in |
| Signature | | | | Classifier | DLBCL; Up |
| | | | | Separating | in MCL |
| | | | | MCLs and | |
| | | | | DLBCLs | |
| MCL | NM_019841 | TRPV5 | transient receptor | Strong | Down in |
| Signature | | | potential cation | Classifier | DLBCL; Up |
| | | | channel, subfamily V, | Separating | in MCL; |
| | | | member 5 | MCLs and | Down in |
| | | | | DLBCLs and | CD5+; Up in |
| | | | | CD5+ from | CD5− |
| | | | | CD5− DLBCLs | |
| MCL | NM_001760 | CCND3 | cyclin D3 | RT-PCR | Up in MCL |
| Signature | | | | Comparison of | vs. CLL |
| | | | | CLL and MCL | |
| MCL | NM_004064 | CDKN1B | cyclin-dependent | RT-PCR | Down in |
| Signature | | | kinase inhibitor 1B | Comparison of | MCL vs. |
| | | | (p27, Kip1) | CLL and MCL | CLL |
| MCL | NM_005225 | E2F1 | E2F transcription | RT-PCR | Up in MCL |
| Signature | | | factor 1 | Comparison of | vs. CLL |
| | | | | CLL and MCL | |
| MCL | NM_003810 | TNFSF10 | tumor necrosis factor | RT-PCR | Up in MCL |
| Signature | | | (ligand) superfamily, | Comparison of | vs. CLL |
| | | | member 10 | CLL and MCL | |
| MCL | NM_013995 | LAMP2 | lysosomal-associated | Gene | High in MCL |
| Signature | | | membrane protein 2 | Expression | and DLBCL |
| | | | | Analysis in | cell lines |
| | | | | MCL cell lines | |
| MCL | NM_000698 | ALOX5 | arachidonate 5- | Molecular | Up in MCL |
| Signature | | | lipoxygenase | Diagnosis | vs. |
| | | | | | CLL/DLBCL |
| MCL | NM_017935 | BANK1 | B-cell scaffold protein | Molecular | Up in MCL |
| Signature | | | with ankyrin repeats 1 | Diagnosis | vs. |
| | | | | | CLL/DLBCL |
| MCL | NM_004126 | GNG11 | guanine nucleotide | Molecular | Up in MCL |
| Signature | | | binding protein (G | Diagnosis | vs. |
| | | | protein), gamma 11 | | CLL/DLBCL |
| MCL | NM_000598 | IGFBP3 | insulin-like growth | Molecular | Up in MCL |
| Signature | | | factor binding protein 3 | Diagnosis | vs. |
| | | | | | CLL/DLBCL |
| MCL | NM_007360 | KLRK1 | killer cell lectin-like | Molecular | Up in MCL |
| Signature | | | receptor subfamily K, | Diagnosis | vs. |
| | | | member 1 | | CLL/DLBCL |
| CLL vs. | NM_004454 | ETV5 | ets variant gene 5 (ets- | RT-PCR | High in CLL |
| MCL | | | related molecule) | analysis shows | |
| | | | | up regulation in | |
| | | | | CLL | |
| MCL | NM_001647 | APOD | apolipoprotein D | | up in MCL |
| | | | | | (5.5); down |
| | | | | | in FL vs |
| | | | | | MCL (−8.3) |
| MCL | NM_015436 | RCHY1 | ring finger and CHY | | up in MCL |
| | | | zinc finger domain | | (4.3) |
| | | | containing 1 | | |
| CLL vs. | NM_001760 | CCND3 | cyclin D3 | CLL Vs. MCL | High in CLL |
| MCL | | | | Distinguisher | |
| MCL | NM_017784 | OSBPL10 | oxysterol binding | | up in MCL |
| | | | protein-like 10 | | (4.7) |
| CLL/SLL | NM_020944 | GBA2 | glucosidase, beta (bile | | down in |
| vs MCL | | | acid) 2 | | MCL vs SLL |
| | | | | | (−5.1) |
| CLL vs. | NM_053056 | CCND1 | cyclin D1 | MCL, CLL | High in CLL |
| MCL | | | (BCL1/PRAD1: | Signature&CLL | |
| | | | parathyroid | Vs. MCL | |
| | | | adenomatosis 1) | Distinguisher | |
| MCL | NM_004225 | MFHAS1 | malignant fibrous | Molecular | Up in MCL |
| Signature | | | histiocytoma amplified | Diagnosis | vs. |
| | | | sequence 1 | | CLL/DLBCL |
| MCL | NM_014257 | CD209L | CD209 antigen-like | | down in |
| | | | | | MCL (−5.1); |
| | | | | | down in |
| | | | | | MCL vs SLL |
| | | | | | (−4.8) |
| MCL | NM_152866 | MS4A1 | membrane-spanning 4- | Molecular | Up in MCL |
| Signature | | | domains, subfamily A, | Diagnosis | vs. |
| | | | member 1 | | CLL/DLBCL |
| MCL | NM_004827 | ABCG2 | ATP-binding cassette, | | down in |
| | | | sub-family G | | MCL (−4.6) |
| | | | (WHITE), member 2 | | |
| Survival | NM_006325 | RAN | RAN, member RAS | Proliferation | High in Short |
| (MCL) | | | oncogene family | Signature | Survival |
| Survival | NM_002129 | HMGB2 | high-mobility group | Proliferation | High in Short |
| (MCL) | | | box 2 | Signature | Survival |
| MCL | NM_003254 | TIMP1 | tissue inhibitor of | RT-PCR | Up in MCL, |
| Signature | | | metalloproteinase 1 | Comparison of | Down in |
| | | | (erythroid potentiating | CLL, MCL & | MZL and |
| | | | activity, collagenase | MZL | CLL |
| | | | inhibitor) | | |
| MCL | NM_024408 | NOTCH2 | Notch homolog 2 | RT-PCR | Down in |
| Signature | | | (Drosophila) | Comparison of | MCL & CLL, |
| | | | | CLL, MCL & | Up in MZL |
| | | | | MZL | |
| CLL vs. | NM_004064 | CDKN1B | cyclin-dependent | MCL, CLL | High in CLL |
| MCL | | | kinase inhibitor 1B | Signature&CLL | |
| | | | (p27, Kip1) | Vs. MCL | |
| | | | | Distinguisher | |
| CLL/SLL | NM_001830 | CLCN4 | chloride channel 4 | | down in |
| vs MCL | | | | | MCL vs SLL |
| | | | | | (−4.9) |

TABLE 10
An HCP set specific for DLBCL, according to one embodiment
of the invention

| DLBCL | |
|---|---|
| Signature | |
| Accession | Symbol |
| NM_000785.2 | CYP27B1 |
| NM_005652.2 | TERF2 |
| NM_006317.3 | BASP1 |
| NM_057735.1 | CCNE2 |
| NM_145804.1 | ABTB2 |
| NM_182776.1 | MCM7 |
| NM_001067.2 | TOP2A |
| NM_002426.1 | MMP12 |
| NM_000075.2 | CDK4 |
| NM_000877.2 | IL1R1 |
| NM_002661.1 | PLCG2 |
| NM_005658.2 | TRAF1 |
| NM_001951.2 | E2F5 |
| NM_002358.2 | MAD2L1 |
| NM_021950.2 | MS4A1 |
| NM_000269.2 | NME1 |
| NM_001826.1 | CKS1B |
| NM_175870.3 | LOC90925 |
| NM_182746.1 | MCM4 |
| NM_004460.2 | FAP |
| NM_006892.3 | DNMT3B |
| NM_012203.1 | GRHPR |
| AI809213.1 | RGS13 |
| NM_001197.3 | BIK |
| NM_001618.2 | PARP1 |
| NM_001771.1 | CD22 |
| NM_002692.2 | POLE2 |
| NM_031942.3 | CDCA7 |
| NM_015641.2 | TES |
| NM_014456.3 | PDCD4 |
| NM_181443.1 | BTBD3 |
| H57732.1 | TGFBR2 |
| NM_004445.1 | EPHB6 |
| NM_003243.1 | TGFBR3 |
| NM_004951.2 | EBI2 |
| NM_005935.1 | MLLT2 |
| NM_000633.1 | BCL2 |
| NM_000927.3 | ABCB1 |
| NM_002350.1 | LYN |
| NM_001558.2 | IL10RA |
| NM_005213.2 | CSTA |
| NM_005127.2 | CLECSF2 |
| W56129.1 | SFRS9 |
| NM_004358.3 | CDC25B |
| NM_004126.2 | GNG11 |
| BX504817.1 | SFRS7 |
| AI597616.1 | MRPL33 |
| NM_006257.2 | PRKCQ |
| NM_000873.2 | ICAM2 |
| NM_002943.2 | RORA |
| NM_001230.3 | CASP10 |

TABLE 11
An HCP set specific for FL, according to one embodiment
of the invention

| FL Signature | |
|---|---|
| Accession | Symbol |
| NM_004619.2 | TRAF5 |
| NM_015187.1 | KIAA0746 |
| NM_006317.3 | BASP1 |
| NM_152785.2 | GCET2 |
| NM_006558.1 | KHDRBS3 |
| NM_017784.3 | OSBPL10 |
| NM_145804.1 | ABTB2 |
| NM_006475.1 | POSTN |
| NM_002002.3 | FCER2 |
| NM_000877.2 | IL1R1 |
| NM_001770.3 | CD19 |
| NM_004356.2 | CD81 |
| NM_005658.2 | TRAF1 |
| NM_006986.2 | MAGED1 |
| NM_001951.2 | E2F5 |
| NM_021950.2 | MS4A1 |
| NM_175870.3 | LOC90925 |
| NM_182746.1 | MCM4 |
| NM_002646.2 | PIK3C2B |
| NM_144646.2 | IGJ |
| NM_001242.3 | TNFRSF7 |
| H53164.1 | IRF8 |
| NM_001877.2 | CR2 |
| NM_005292.2 | GPR18 |
| NM_005214.2 | CTLA4 |
| AI809213.1 | RGS13 |
| AI634809.1 | ARID5B |
| NM_013230.1 | CD24 |
| NM_000237.1 | LPL |
| NM_138379.1 | TIMD4 |
| NM_001197.3 | BIK |
| NM_001831.2 | CLU |
| NM_002101.3 | GYPC |
| NM_001618.2 | PARP1 |
| NM_001771.1 | CD22 |
| NM_016336.2 | UBE2J1 |
| NM_030764.2 | SPAP1 |
| NM_031942.3 | CDCA7 |
| NM_006274.2 | CCL19 |
| NM_016187.1 | BIN2 |
| NM_000271.1 | NPC1 |
| NM_138340.3 | ABHD3 |
| NM_003332.2 | TYROBP |
| NM_006254.3 | PRKCD |
| NM_003243.1 | TGFBR3 |
| NM_002350.1 | LYN |
| NM_000917.1 | P4HA1 |
| NM_005077.3 | TLE1 |
| NM_004184.3 | WARS |
| NM_005601.3 | NKG7 |
| NM_032991.1 | CASP3 |
| NM_003810.2 | TNFSF10 |
| NM_001425.1 | EMP3 |
| NM_000397.2 | CYBB |
| NM_002155.3 | HSPA6 |
| NM_005610.1 | RBBP4 |
| NM_005638.3 | SYBL1 |
| NM_001110.1 | ADAM10 |
| NM_001350.2 | DAXX |
| NM_000295.3 | SERPINA1 |
| BX504817.1 | SFRS7 |
| AI597616.1 | MRPL33 |
| NM_000585.2 | IL15 |
| NM_002305.2 | LGALS1 |
| NM_007311.2 | BZRP |
| NM_006332.3 | IFI30 |
| NM_007360.1 | KLRK1 |
| NM_024708.2 | ASB7 |
| NM_033208.2 | TIGD7 |
| NM_000189.4 | HK2 |

TABLE 12
An HCP set specific for HL, according to one embodiment
of the invention

| HL Signature | |
|---|---|
| Accession | Symbol |
| NM_006274.2 | CCL19 |
| NM_000785.2 | CYP27B1 |
| NM_014762.1 | DHCR24 |
| NM_005606.3 | LGMN |
| NM_003226.2 | TFF3 |
| NM_002426.1 | MMP12 |
| NM_000877.2 | IL1R1 |
| NM_004356.2 | CD81 |
| NM_000483.3 | APOC2 |
| NM_005658.2 | TRAF1 |
| NM_003037.1 | SLAMF1 |
| NM_006115.3 | PRAME |
| NM_000853.1 | GSTT1 |
| NM_002646.2 | PIK3C2B |
| NM_016081.2 | KIAA0992 |
| NM_005214.2 | CTLA4 |
| AK022231.1 | STAT1 |
| NM_173624.1 | FLJ40504 |
| NM_001353.4 | AKR1C1 |
| NM_020529.1 | NFKBIA |
| NM_014338.3 | PISD |
| NM_003243.1 | TGFBR3 |
| NM_004951.2 | EBI2 |
| NM_002350.1 | LYN |
| NM_079421.2 | CDKN2D |
| U90916.1 | SORL1 |
| NM_005213.2 | CSTA |
| NM_002155.3 | HSPA6 |
| NM_004126.2 | GNG11 |
| NM_023037.1 | 13CDNA73 |
| AI597616.1 | MRPL33 |
| NM_007360.1 | KLRK1 |
| AW291384.1 | STS-1 |

TABLE 13
An HCP set specific for MCL, according to one embodiment
of the invention

| MCL | |
|---|---|
| Signature | |
| Accession | Symbol |
| NM_004851.1 | NAPSA |
| NM_004619.2 | TRAF5 |
| NM_015187.1 | KIAA0746 |
| NM_002250.2 | KCNN4 |
| NM_012452.2 | TNFRSF13B |
| NM_006317.3 | BASP1 |
| NM_017530.1 | LOC55565 |
| NM_017784.3 | OSBPL10 |
| R99527.1 | MGC39372 |
| NM_182776.1 | MCM7 |
| NM_003177.3 | SYK |
| L29376.1 | 3.8-1 |
| NM_001770.3 | CD19 |
| NM_002661.1 | PLCG2 |
| NM_201593.1 | CACNB2 |
| NM_001951.2 | E2F5 |
| NM_006162.3 | NFATC1 |
| NM_020992.2 | PDLIM1 |
| NM_002120.2 | HLA-DOB |
| NM_021950.2 | MS4A1 |
| NM_003362.2 | UNG |
| NM_175870.3 | LOC90925 |
| NM_000405.3 | GM2A |
| NM_002095.3 | GTF2E2 |
| NM_002646.2 | PIK3C2B |
| NM_001242.3 | TNFRSF7 |
| NM_014686.2 | KIAA0355 |
| AA594161.1 | MYH11 |
| NM_033274.1 | ADAM19 |
| NM_000626.1 | CD79B |
| NM_022552.3 | DNMT3A |
| NM_001877.2 | CR2 |
| U37028.1 | ITGAD |
| NM_014246.1 | CELSR1 |
| AA766908.1 | MME |
| BQ632574.1 | RASA1 |
| NM_013230.1 | CD24 |
| NM_003451.1 | ZNF177 |
| NM_000237.1 | LPL |
| NM_001618.2 | PARP1 |
| NM_001771.1 | CD22 |
| NM_004556.1 | NFKBIE |
| NM_030764.2 | SPAP1 |
| NM_031305.1 | ARHGAP24 |
| NM_017935.2 | BANK1 |
| NM_025113.1 | C13orf18 |
| AK055652.1 | C3orf6 |
| BG993697.1 | SMYD3 |
| NM_016187.1 | BIN2 |
| NM_138340.3 | ABHD3 |
| NM_003332.2 | TYROBP |
| NM_014338.3 | PISD |
| NM_012448.3 | STAT5B |
| NM_198833.1 | SERPINB8 |
| NM_001760.2 | CCND3 |
| NM_004184.3 | WARS |
| NM_005601.3 | NKG7 |
| NM_006889.2 | CD86 |
| NM_003037.1 | SLAMF1 |
| NM_003810.2 | TNFSF10 |
| U90916.1 | SORL1 |
| NM_005213.2 | CSTA |
| NM_002051.2 | GATA3 |
| NM_000043.3 | FAS |
| NM_005013.1 | NUCB2 |
| NM_001779.1 | CD58 |
| NM_030666.2 | SERPINB1 |
| NM_006620.2 | HBS1L |
| NM_001621.2 | AHR |
| NM_004635.3 | MAPKAPK3 |
| NM_023037.1 | 13CDNA73 |
| NM_000295.3 | SERPINA1 |
| AI597616.1 | MRPL33 |
| NM_002966.1 | S100A10 |
| NM_000576.2 | IL1B |
| NM_006498.1 | LGALS2 |
| NM_006257.2 | PRKCQ |
| NM_003656.3 | CAMK1 |
| NM_004529.1 | MLLT3 |
| NM_006332.3 | IFI30 |

TABLE 14
An HCP set specific for MZL, according to one embodiment
of the invention

| MZL | |
|---|---|
| Signature | |
| Accession | Symbol |
| NM_004619.2 | TRAF5 |
| NM_006274.2 | CCL19 |
| NM_003959.1 | HIP1R |
| NM_014257.3 | CD209L |
| NM_015187.1 | KIAA0746 |
| NM_001894.4 | CSNK1E |
| NM_002250.2 | KCNN4 |
| NM_012452.2 | TNFRSF13B |
| NM_006317.3 | BASP1 |
| NM_006558.1 | KHDRBS3 |
| NM_017530.1 | LOC55565 |
| NM_017784.3 | OSBPL10 |
| NM_145804.1 | ABTB2 |
| NM_014762.1 | DHCR24 |
| NM_182776.1 | MCM7 |
| NM_004445.1 | EPHB6 |
| NM_001888.1 | CRYM |
| NM_003226.2 | TFF3 |
| NM_003177.3 | SYK |
| NM_001853.2 | COL9A3 |
| NM_000075.2 | CDK4 |
| NM_002002.3 | FCER2 |
| NM_001770.3 | CD19 |
| NM_000483.3 | APOC2 |
| NM_000109.2 | DMD |
| NM_006986.2 | MAGED1 |
| NM_003088.2 | FSCN1 |
| NM_001951.2 | E2F5 |
| NM_006841.3 | SLC38A3 |
| NM_006761.3 | YWHAE |
| NM_004073.2 | PLK3 |
| NM_006162.3 | NFATC1 |
| NM_002120.2 | HLA-DOB |
| NM_002738.5 | PRKCB1 |
| NM_021950.2 | MS4A1 |
| NM_000269.2 | NME1 |
| NM_175870.3 | LOC90925 |
| NM_000405.3 | GM2A |
| NM_002217.1 | ITIH3 |
| NM_000853.1 | GSTT1 |
| NM_021966.1 | TCL1A |
| NM_002646.2 | PIK3C2B |
| NM_144646.2 | IGJ |
| NM_001242.3 | TNFRSF7 |
| NM_030775.2 | WNT5B |
| NM_000626.1 | CD79B |
| NM_001877.2 | CR2 |
| NM_004422.2 | DVL2 |
| U37028.1 | ITGAD |
| NM_006892.3 | DNMT3B |
| AI809213.1 | RGS13 |
| AI634809.1 | ARID5B |
| AA766908.1 | MME |
| BQ632574.1 | RASA1 |
| NM_173624.1 | FLJ40504 |
| NM_013230.1 | CD24 |
| NM_001647.1 | APOD |
| AK022293.1 | CTSD |
| NM_080881.1 | DBN1 |
| NM_001782.1 | CD72 |
| NM_000237.1 | LPL |
| NM_004844.1 | SH3BP5 |
| NM_001197.3 | BIK |
| NM_006763.2 | BTG2 |
| NM_001353.4 | AKR1C1 |
| NM_000424.2 | KRT5 |
| NM_001771.1 | CD22 |
| NM_002832.2 | PTPN7 |
| NM_002891.3 | RASGRF1 |
| AW271958.1 | TYMS |
| NM_025216.2 | WNT10A |
| NM_030764.2 | SPAP1 |
| NM_031942.3 | CDCA7 |
| X58529.1 | IGHM |
| NM_001852.3 | COL9A2 |
| NM_018842.3 | BAIAP2L1 |
| NM_025113.1 | C13orf18 |
| NM_002122.2 | HLA-DQA1 |
| AK055652.1 | C3orf6 |
| NM_000271.1 | NPC1 |
| NM_138340.3 | ABHD3 |
| NM_003332.2 | TYROBP |
| NM_020199.1 | C5orf15 |
| NM_004117.2 | FKBP5 |
| NM_004289.5 | NFE2L3 |
| NM_177968.1 | PPM1B |
| NM_015641.2 | TES |
| NM_080593.1 | HIST1H2BK |
| NM_015866.2 | PRDM2 |
| T66903.1 | LOC54103 |
| NM_001154.2 | ANXA5 |
| NM_002467.2 | MYC |
| NM_005935.1 | MLLT2 |
| NM_001762.2 | CCT6A |
| NM_000313.1 | PROS1 |
| NM_000927.3 | ABCB1 |
| NM_002350.1 | LYN |
| NM_005271.1 | GLUD1 |
| NM_000917.1 | P4HA1 |
| NM_000655.2 | SELL |
| NM_000788.1 | DCK |
| NM_000038.2 | APC |
| M80899.1 | MGC5395 |
| NM_172373.2 | ELF1 |
| NM_001760.2 | CCND3 |
| NM_001663.2 | ARF6 |
| NM_004184.3 | WARS |
| NM_005461.3 | MAFB |
| NM_005601.3 | NKG7 |
| NM_006889.2 | CD86 |
| NM_003875.1 | GMPS |
| NM_032991.1 | CASP3 |
| NM_003810.2 | TNFSF10 |
| NM_004354.1 | CCNG2 |
| NM_003915.2 | RBM12 |
| U90916.1 | SORL1 |
| NM_000397.2 | CYBB |
| NM_005348.2 | HSPCA |
| NM_002526.1 | NT5E |
| NM_001068.2 | TOP2B |
| NM_005610.1 | RBBP4 |
| NM_005013.1 | NUCB2 |
| NM_005638.3 | SYBL1 |
| NM_005127.2 | CLECSF2 |
| NM_002838.2 | PTPRC |
| NM_006006.3 | ZBTB16 |
| NM_006218.1 | PIK3CA |
| NM_002306.1 | LGALS3 |
| NM_139276.2 | STAT3 |
| NM_000627.2 | LTBP1 |
| NM_030666.2 | SERPINB1 |
| NM_002967.2 | SAFB |
| NM_003217.1 | TEGT |
| NM_018442.1 | IQWD1 |
| NM_004125.2 | GNG10 |
| NM_181838.1 | UBE2D2 |
| W56129.1 | SFRS9 |
| NM_002211.2 | ITGB1 |
| NM_004126.2 | GNG11 |
| NM_000584.2 | IL8 |
| NM_006195.2 | PBX3 |
| NM_023037.1 | 13CDNA73 |
| NM_000295.3 | SERPINA1 |
| NM_004049.2 | BCL2A1 |
| NM_002966.1 | S100A10 |
| NM_000585.2 | IL15 |
| NM_003656.3 | CAMK1 |
| NM_000579.1 | CCR5 |
| NM_001967.2 | EIF4A2 |
| NM_002752.3 | MAPK9 |
| NM_002892.2 | ARID4A |
| NM_002943.2 | RORA |
| NM_006164.2 | NFE2L2 |
| NM_006644.2 | HSPH1 |
| NM_007360.1 | KLRK1 |
| NM_016628.2 | WAC |
| NM_021822.1 | APOBEC3G |
| NM_024708.2 | ASB7 |
| NM_000713.1 | BLVRB |

TABLE 15
An HCP set specific for SLL, according to one embodiment
of the invention

| SLL | |
|---|---|
| Signature | |
| Accession | Symbol |
| NM_004619.2 | TRAF5 |
| NM_006274.2 | CCL19 |
| NM_014257.3 | CD209L |
| NM_015187.1 | KIAA0746 |
| NM_001894.4 | CSNK1E |
| NM_002250.2 | KCNN4 |
| NM_017530.1 | LOC55565 |
| NM_017784.3 | OSBPL10 |
| NM_006734.2 | HIVEP2 |
| NM_003226.2 | TFF3 |
| NM_003177.3 | SYK |
| L29376.1 | 3.8-1 |
| NM_001853.2 | COL9A3 |
| NM_000075.2 | CDK4 |
| NM_002002.3 | FCER2 |
| NM_001770.3 | CD19 |
| NM_000109.2 | DMD |
| NM_201593.1 | CACNB2 |
| NM_001951.2 | E2F5 |
| NM_006841.3 | SLC38A3 |
| NM_004073.2 | PLK3 |
| NM_006162.3 | NFATC1 |
| NM_002120.2 | HLA-DOB |
| NM_002738.5 | PRKCB1 |
| NM_021950.2 | MS4A1 |
| NM_003362.2 | UNG |
| NM_000269.2 | NME1 |
| NM_021966.1 | TCL1A |
| NM_001242.3 | TNFRSF7 |
| H53164.1 | IRF8 |
| AA594161.1 | MYH11 |
| NM_000626.1 | CD79B |
| NM_001877.2 | CR2 |
| NM_006892.3 | DNMT3B |
| AI634809.1 | ARID5B |
| BQ632574.1 | RASA1 |
| AI672553.1 | AKAP12 |
| NM_002567.2 | PBP |
| NM_173624.1 | FLJ40504 |
| NM_013230.1 | CD24 |
| NM_003451.1 | ZNF177 |
| AK022293.1 | CTSD |
| NM_005449.3 | TOSO |
| NM_001782.1 | CD72 |
| NM_000237.1 | LPL |
| NM_004844.1 | SH3BP5 |
| NM_001197.3 | BIK |
| NM_001353.4 | AKR1C1 |
| NM_001552.1 | IGFBP4 |
| NM_001771.1 | CD22 |
| NM_002692.2 | POLE2 |
| NM_002832.2 | PTPN7 |
| NM_002891.3 | RASGRF1 |
| NM_004556.1 | NFKBIE |
| NM_025216.2 | WNT10A |
| NM_030764.2 | SPAP1 |
| NM_001852.3 | COL9A2 |
| NM_001238.1 | CCNE1 |
| NM_025113.1 | C13orf18 |
| NM_002122.2 | HLA-DQA1 |
| AK055652.1 | C3orf6 |
| AL080130.1 | FLJ14001 |
| NM_000271.1 | NPC1 |
| NM_138340.3 | ABHD3 |
| NM_003332.2 | TYROBP |
| NM_004117.2 | FKBP5 |
| NM_001196.2 | BID |
| NM_015641.2 | TES |
| NM_012448.3 | STAT5B |
| NM_181443.1 | BTBD3 |
| NM_006254.3 | PRKCD |
| H57732.1 | TGFBR2 |
| NM_001154.2 | ANXA5 |
| NM_002467.2 | MYC |
| NM_004951.2 | EBI2 |
| NM_005935.1 | MLLT2 |
| NM_005415.3 | SLC20A1 |
| NM_000927.3 | ABCB1 |
| NM_000917.1 | P4HA1 |
| NM_004184.3 | WARS |
| NM_005601.3 | NKG7 |
| NM_006889.2 | CD86 |
| NM_032991.1 | CASP3 |
| NM_003810.2 | TNFSF10 |
| NM_001166.3 | BIRC2 |
| NM_004354.1 | CCNG2 |
| NM_003915.2 | RBM12 |
| U90916.1 | SORL1 |
| NM_005211.2 | CSF1R |
| NM_000397.2 | CYBB |
| NM_005213.2 | CSTA |
| NM_002051.2 | GATA3 |
| NM_001068.2 | TOP2B |
| NM_005013.1 | NUCB2 |
| NM_005638.3 | SYBL1 |
| NM_002838.2 | PTPRC |
| NM_006006.3 | ZBTB16 |
| NM_001110.1 | ADAM10 |
| NM_002306.1 | LGALS3 |
| NM_000627.2 | LTBP1 |
| NM_030666.2 | SERPINB1 |
| NM_002967.2 | SAFB |
| NM_003217.1 | TEGT |
| NM_018442.1 | IQWD1 |
| W56129.1 | SFRS9 |
| NM_002211.2 | ITGB1 |
| NM_000584.2 | IL8 |
| NM_000295.3 | SERPINA1 |
| NM_004049.2 | BCL2A1 |
| NM_002966.1 | S100A10 |
| NM_003299.1 | TRA1 |
| NM_000576.2 | IL1B |
| NM_006498.1 | LGALS2 |
| NM_000585.2 | IL15 |
| NM_001831.2 | CLU |
| NM_003656.3 | CAMK1 |
| NM_003254.1 | TIMP1 |
| NM_002305.2 | LGALS1 |
| NM_000579.1 | CCR5 |
| NM_001967.2 | EIF4A2 |
| NM_002943.2 | RORA |
| NM_004529.1 | MLLT3 |
| NM_006164.2 | NFE2L2 |
| NM_006332.3 | IFI30 |
| NM_006644.2 | HSPH1 |
| BI769730.1 | HLA-DRB1 |
| NM_005347.2 | HSPA5 |
| NM_000189.4 | HK2 |

TABLE 16
An HCP set specific for TCL, according to one embodiment
of the invention

| TCL | |
|---|---|
| Signature | |
| Accession No. | Symbol |
| NM_006274.2 | CCL19 |
| NM_005856.1 | RAMP3 |
| NM_004577.3 | PSPH |
| NM_004737.2 | LARGE |
| AF196185.1 | PARD3 |
| NM_017955.2 | CDCA4 |
| NM_014762.1 | DHCR24 |
| NM_006475.1 | POSTN |
| NM_004091.2 | E2F2 |
| NM_016076.2 | PNAS-4 |
| NM_078467.1 | CDKN1A |
| NM_002189.2 | IL15RA |
| NM_006841.3 | SLC38A3 |
| NM_002358.2 | MAD2L1 |
| NM_001254.2 | CDC6 |
| NM_000600.1 | IL6 |
| NM_002105.1 | H2AFX |
| NM_000269.2 | NME1 |
| NM_001826.1 | CKS1B |
| NM_001827.1 | CKS2 |
| NM_182746.1 | MCM4 |
| NM_000853.1 | GSTT1 |
| NM_007361.2 | NID2 |
| NM_004460.2 | FAP |
| NM_016081.2 | KIAA0992 |
| NM_003290.1 | TPM4 |
| NM_030775.2 | WNT5B |
| NM_004322.2 | BAD |
| NM_005623.2 | CCL8 |
| NM_006892.3 | DNMT3B |
| NM_005950.1 | MT1G |
| NM_080881.1 | DBN1 |
| NM_005951.1 | MT1H |
| NM_003254.1 | TIMP1 |
| NM_001353.4 | AKR1C1 |
| NM_002692.2 | POLE2 |
| NM_006014.2 | DXS9879E |
| NM_016336.2 | UBE2J1 |
| NM_002122.2 | HLA-DQA1 |
| NM_000075.2 | CDK4 |
| NM_004851.1 | NAPSA |
| AB014540.1 | SWAP70 |
| NM_015641.2 | TES |
| NM_015866.2 | PRDM2 |
| NM_014456.3 | PDCD4 |
| T66903.1 | LOC54103 |
| NM_139207.1 | NAP1L1 |
| H57732.1 | TGFBR2 |
| NM_003648.2 | DGKD |
| NM_005582.1 | LY64 |
| NM_003243.1 | TGFBR3 |
| NM_004951.2 | EBI2 |
| NM_005935.1 | MLLT2 |
| NM_003177.3 | SYK |
| NM_002002.3 | FCER2 |
| NM_002350.1 | LYN |
| NM_000655.2 | SELL |
| NM_005531.1 | IFI16 |
| NM_005077.3 | TLE1 |
| NM_003810.2 | TNFSF10 |
| NM_004354.1 | CCNG2 |
| NM_006162.3 | NFATC1 |
| U90916.1 | SORL1 |
| NM_000397.2 | CYBB |
| NM_021950.2 | MS4A1 |
| NM_175870.3 | LOC90925 |
| NM_005013.1 | NUCB2 |
| NM_021966.1 | TCL1A |
| NM_005127.2 | CLECSF2 |
| NM_002838.2 | PTPRC |
| NM_001781.1 | CD69 |
| NM_000627.2 | LTBP1 |
| NM_030666.2 | SERPINB1 |
| NM_001706.2 | BCL6 |
| NM_002967.2 | SAFB |
| NM_003217.1 | TEGT |
| NM_000061.1 | BTK |
| W56129.1 | SFRS9 |
| NM_004271.1 | LY86 |
| NM_002211.2 | ITGB1 |
| NM_000626.1 | CD79B |
| NM_023037.1 | 13CDNA73 |
| NM_004510.2 | SP110 |
| AL833316.1 | MIR |
| NM_001967.2 | EIF4A2 |
| NM_006164.2 | NFE2L2 |
| NM_007360.1 | KLRK1 |
| NM_020151.2 | STARD7 |
| NM_021813.1 | BACH2 |
| NM_030764.2 | SPAP1 |
| BE897089.1 | ZNF91 |
| NM_017935.2 | BANK1 |

TABLE 17
An HCP set specific for CLL, according to one embodiment of the
invention

| | GenBank ™ |
|---|---|
| Symbol | Accession No. |
| BAIAP2L1 | NM_018842.3 |
| C3orf6 | AK055652.1 |
| CD74 | NM_004355.1 |
| CDCA7 | NM_031942.3 |
| CDKN3 | NM_005192.2 |
| CLIC5 | NM_016184.2 |
| CNN3 | AL049313.1 |
| COL1A2 | NM_001839.2 |
| CX3CR1 | NM_000089.3 |
| ENPP2 | NM_001337.2 |
| GATA3 | NM_006209.2 |
| HCK | NM_002051.2 |
| IGFBP7 | NM_002110.2 |
| ITGAL | NM_001553.1 |
| LGALS2 | T28925.1 |
| LGALS3 | NM_006498.1 |
| LOC54103 | NM_002306.1 |
| MT1H | AI523104.1 |
| NK4 | T66903.1 |
| NKG7 | NM_005951.1 |
| PLA2G7 | NM_004221.3 |
| PLAU | NM_005601.3 |
| PON2 | NM_005084.2 |
| PPBP | NM_002658.1 |
| PRKCD | NM_000305.1 |
| SPAP1 | NM_002704.2 |
| SPIB | NM_006254.3 |
| STAT1 | NM_030764.2 |
| TCF4 | NM_003121.1 |
| TLE1 | AK022231.1 |
| TNFSF10 | AI307786.1 |
| TRIP6 | NM_005077.3 |
| TYROBP | NM_003810.2 |
| CLECSF6 | NM_003302.1 |
| LILRB1 | NM_003332.2 |
| ANXA1 | NM_000700.1 |
| BCL2A1 | NM_000484.2 |
| CCNA2 | NM_004049.2 |
| CD24 | NM_001237.2 |
| CDC2 | NM_013230.1 |
| CSF3R | NM_001786.2 |
| ENTPD1 | NM_156038.2 |
| FN1 | NM_001776.3 |
| APP | NM_212474.1 |
| STMN1 | NM_005531.1 |
| IFI16 | NM_001558.2 |
| IL10RA | NM_007360.1 |
| KLRK1 | NM_000237.1 |
| LPL | NM_002341.1 |
| LTB | NM_002358.2 |
| MAD2L1 | NM_021038.3 |
| MBNL1 | NM_002619.1 |
| PF4 | NM_002692.2 |
| POLE2 | NM_006115.3 |
| PRAME | NM_004577.3 |
| PSPH | NM_005608.1 |
| PTPRCAP | NM_015149.2 |
| RGL1 | NM_003821.4 |
| RIPK2 | NM_005621.1 |
| S100A12 | NM_006748.1 |
| SLA | U90916.1 |
| SORL1 | NM_005563.3 |
| SWAP70 | AB014540.1 |
| TFRC | NM_003234.1 |
| TRAF1 | NM_005658.2 |
| ZAP70 | NM_001079.3 |

TABLE 18
An HCP set specific for AML, according to one embodiment of the
invention

| | GenBank ™ |
|---|---|
| Symbol | Accession No. |
| BIRC5 | NM_001168.1 |
| BZRP | NM_007311.2 |
| C13orf18 | NM_025113.1 |
| C3orf6 | AK055652.1 |
| CDC20 | NM_001255.1 |
| CDC6 | NM_001254.2 |
| CDCA7 | NM_031942.3 |
| CDKN3 | NM_005192.2 |
| CHEK1 | NM_001274.2 |
| CLIC5 | AL049313.1 |
| CSF1R | NM_005211.2 |
| DMD | NM_000109.2 |
| FGR | NM_005248.1 |
| HCK | NM_002110.2 |
| IL16 | NM_004513.3 |
| KNTC2 | NM_006101.1 |
| LGALS1 | NM_002305.2 |
| LGALS3 | NM_002306.1 |
| LILRB1 | AI523104.1 |
| NKG7 | NM_005601.3 |
| PCDH9 | BC042366.1 |
| PLA2G7 | NM_005084.2 |
| PLCG2 | NM_002661.1 |
| PON2 | NM_000305.1 |
| PPBP | NM_002704.2 |
| PRKCD | NM_006254.3 |
| PTPN6 | NM_002831.3 |
| PTPRC | NM_002838.2 |
| RAB13 | NM_002870.2 |
| RAG2 | NM_000536.1 |
| S100A6 | NM_014624.2 |
| SERPINA1 | NM_000295.3 |
| SFRS3 | BE927772.1 |
| SPAP1 | NM_030764.2 |
| SPIB | NM_003121.1 |
| TCF4 | AI307786.1 |
| TCF7 | NM_201632.1 |
| TIMP1 | NM_003254.1 |
| TLE1 | NM_005077.3 |
| AKAP12 | AI672553.1 |
| ANXA1 | NM_000700.1 |
| APOBEC3G | NM_021822.1 |
| ASPM | NM_018136.2 |
| AUTS2 | NM_015570.1 |
| BASP1 | NM_006317.3 |
| BCL2A1 | NM_004049.2 |
| BIRC3 | NM_001165.3 |
| BTK | NM_000061.1 |
| CASP4 | AL050391.1 |
| CCL5 | NM_002985.2 |
| CCNA2 | NM_001237.2 |
| CD2 | NM_001767.2 |
| CD24 | NM_013230.1 |
| CD36 | NM_001001547.1 |
| CD3D | NM_000732.2 |
| CD44 | NM_000610.3 |
| CD79B | NM_000626.1 |
| CD86 | NM_006889.2 |
| CDC2 | NM_001786.2 |
| CDCA1 | NM_031423.2 |
| CR2 | NM_001877.2 |
| CSF3R | NM_156038.2 |
| CSTA | NM_005213.2 |
| CTGF | NM_001901.1 |
| CX3CR1 | NM_001337.2 |
| CXCR4 | NM_003467.1 |
| DNTT | NM_004088.2 |
| EBI2 | NM_004951.2 |
| ENPP2 | NM_006209.2 |
| ENTPD1 | NM_001776.3 |
| FCER2 | NM_002002.3 |
| FLJ40504 | NM_173624.1 |
| GUCY1A3 | NM_000856.1 |
| HCLS1 | NM_005335.3 |
| HIST1H2AC | BC050602.1 |
| HIVEP2 | NM_006734.2 |
| HLA- | NM_006120.2 |
| DMA | |
| HLA- | NM_033554.2 |
| DPA1 | |
| HLA- | NM_002121.4 |
| DPB1 | |
| HLA- | NM_019111.2 |
| DRA | |
| IFI30 | NM_006332.3 |
| IFI44L | NM_006820.1 |
| IGJ | NM_144646.2 |
| IL10RA | NM_001558.2 |
| KIF2C | NM_006845.2 |
| KLRK1 | NM_007360.1 |
| KRT19 | NM_002276.3 |
| LCK | NM_005356.2 |
| LTB | NM_002341.1 |
| LY86 | NM_004271.1 |
| MAD2L1 | NM_002358.2 |
| MAL | NM_022438.1 |
| MBNL1 | NM_021038.3 |
| MGMT | NM_002412.2 |
| MS4A1 | NM_021950.2 |
| MT1G | NM_005950.1 |
| MYL4 | W04885.1 |
| NAPSA | NM_004851.1 |
| NCF4 | NM_013416.2 |
| P2RY5 | NM_005767.3 |
| PF4 | NM_002619.1 |
| PLAU | NM_002658.1 |
| POLE2 | NM_002692.2 |
| PRAME | NM_006115.3 |
| PSPH | NM_004577.3 |
| PTPRCAP | NM_005608.1 |
| RGL1 | NM_015149.2 |
| RIPK2 | NM_003821.4 |
| RNASE1 | NM_198232.1 |
| S100A12 | NM_005621.1 |
| S100A4 | NM_002961.2 |
| SAMHD1 | NM_015474.2 |
| SERPINB1 | NM_030666.2 |
| SERPING 1 | NM_000062.1 |
| SESN3 | BU929213.1 |
| SLA | NM_006748.1 |
| SLAMF1 | NM_003037.1 |
| SLC1A4 | NM_003038.2 |
| SORL1 | U90916.1 |
| STMN1 | NM_005563.3 |
| SWAP70 | AB014540.1 |
| TCL1A | NM_021966.1 |
| TFRC | NM_003234.1 |
| TOP2A | NM_001067.2 |
| TRIP6 | NM_003302.1 |
| TXNIP | NM_006472.1 |
| TYROBP | NM_003332.2 |
| VEGF | BC058855.1 |
| ZAP70 | NM_001079.3 |

TABLE 19
An HCP set specific for T-ALL, according to one embodiment of the
invention

| | GenBank ™ |
|---|---|
| Symbol | Accession No. |
| BIRC5 | NM_002102.2 |
| C13orf18 | NM_001168.1 |
| C3orf6 | NM_001255.1 |
| CD74 | NM_006101.1 |
| CDC20 | NM_001254.2 |
| CDC6 | NM_001274.2 |
| CHEK1 | NM_000536.1 |
| CLIC5 | NM_004088.2 |
| CSF1R | NM_201632.1 |
| DNTT | NM_005601.3 |
| FGR | NM_002838.2 |
| GYPE | AL049313.1 |
| IL16 | AI307786.1 |
| KNTC2 | NM_000305.1 |
| LILRB1 | AK055652.1 |
| NKG7 | NM_002870.2 |
| PCDH9 | NM_025113.1 |
| PLCG2 | NM_002661.1 |
| PON2 | NM_003121.1 |
| PTPRC | NM_004513.3 |
| RAB13 | AI523104.1 |
| RAG2 | NM_004355.1 |
| SERPINA1 | BC042366.1 |
| SPIB | NM_005248.1 |
| TCF4 | NM_001242.3 |
| TCF7 | NM_005211.2 |
| TNFRSF7 | NM_000295.3 |
| AKAP12 | W04885.1 |
| ANXA1 | NM_013230.1 |
| APP | NM_173624.1 |
| ASPM | BC058855.1 |
| AUTS2 | NM_002358.2 |
| BASP1 | NM_018136.2 |
| BCL2A1 | NM_006845.2 |
| BIRC3 | NM_031966.2 |
| BTK | NM_001237.2 |
| CASP4 | NM_001067.2 |
| CCL5 | NM_003234.1 |
| CCNA2 | NM_001786.2 |
| CCNB1 | NM_002692.2 |
| CD2 | NM_004577.3 |
| CD24 | NM_022438.1 |
| CD36 | NM_006748.1 |
| CD37 | NM_004615.2 |
| CD3D | NM_000700.1 |
| CD44 | NM_000732.2 |
| CD86 | NM_003467.1 |
| CDC2 | NM_001767.2 |
| CNN3 | NM_005356.2 |
| CSF3R | NM_006734.2 |
| CSTA | NM_001079.3 |
| CTGF | NM_005608.1 |
| CXCR4 | NM_005531.1 |
| EBI2 | NM_012151.2 |
| ENG | AI672553.1 |
| ENPP2 | BU929213.1 |
| ENTPD1 | NM_005965.3 |
| F8A1 | NM_000237.1 |
| FCER2 | NM_001839.2 |
| FLJ40504 | NM_006209.2 |
| FN1 | NM_000062.1 |
| HCK | NM_212474.1 |
| HCLS1 | NM_001901.1 |
| HIST1H2AC | NM_003302.1 |
| HIVEP2 | NM_003821.4 |
| HLA-DMA | BC050602.1 |
| HLA-DPA1 | NM_015149.2 |
| HLA-DPB1 | NM_021966.1 |
| HLA-DRA | NM_002002.3 |
| IFI16 | NM_006317.3 |
| IFI30 | NM_006120.2 |
| IFI44L | NM_001774.1 |
| IGJ | NM_144646.2 |
| IL10RA | NM_021950.2 |
| KIF2C | NM_002341.1 |
| KLRK1 | NM_013416.2 |
| LCK | NM_005213.2 |
| LPL | NM_015570.1 |
| LTB | U90916.1 |
| LY86 | NM_004049.2 |
| MAD2L1 | NM_015474.2 |
| MAL | NM_004951.2 |
| MBNL1 | NM_003037.1 |
| MS4A1 | NM_156038.2 |
| MYL4 | NM_001776.3 |
| MYLK | NM_004851.1 |
| NAPSA | NM_000484.2 |
| NCF4 | NM_006820.1 |
| POLE2 | NM_000061.1 |
| PSPH | NM_002985.2 |
| PTPRCAP | NM_001558.2 |
| RGL1 | NM_000610.3 |
| RIPK2 | NM_004271.1 |
| S100A12 | AB014540.1 |
| S100A4 | NM_001165.3 |
| SAMHD1 | NM_006889.2 |
| SERPING1 | NM_002110.2 |
| SESN3 | NM_005335.3 |
| SLA | NM_007360.1 |
| SLAMF1 | NM_000118.1 |
| SORL1 | AL050391.1 |
| SWAP70 | NM_001001547.1 |
| TCL1A | NM_005621.1 |
| TFRC | NM_021038.3 |
| TM4SF2 | NM_006332.3 |
| TOP2A | NM_002961.2 |
| TRIP6 | NM_006472.1 |
| TXNTP | NM_003332.2 |
| TYROBP | NM_033554.2 |
| VEGF | NM_002121.4 |
| ZAP70 | NM_019111.2 |

### 1.2 Polynucleotide Probes

[0078] The system of the present invention provides for combinations of polynucleotide probes (hematological cancer profiling (HCP) combinations) that are capable of detecting the genes of one or more HCP set. Each polynucleotide probe of the HCP combination comprises a nucleotide sequence derived from the nucleotide sequence of a gene within an HCP set (the target gene). The nucleotide sequence of the polynucleotide probe is designed such that it corresponds to, or is complementary to, a region that is unique to the target gene, or mRNA transcribed from the gene.

[0079] The polynucleotide probe can specifically hybridize under either stringent or lowered stringency hybridization conditions to a region of the target gene, to a mRNA transcribed from the target gene, or to a nucleic acid sequence (such as a cDNA) derived therefrom. If splice variants of a gene are known, the probe may be designed such that it hybridises to only a single splice variant (for example, comprising a sequence complementary to a region of the mRNA unique to that splice variant), or it may be designed such that it hybridises to all splice variants (for example, comprising a sequence complementary to a region of the mRNA common to all splice variants). When splice-variant specific probes are used, several different probes may be designed, each one specific for a different splice-variant.

[0080] The selection of the polynucleotide probe sequences and determination of their uniqueness may be carried out in silico using techniques known in the art, for example, based on a BLASTN search of the polynucleotide sequence in question against gene sequence databases, such as the Human Genome Sequence, UniGene, dbEST or the non-redundant database at NCBI. In one embodiment of the invention, the polynucleotide probe is complementary to a region of a target mRNA derived from a target gene in the HCP set. Computer programs can also be employed to select probe sequences that will not cross hybridize or will not hybridize non-specifically.

[0081] One skilled in the art will understand that the nucleotide sequence of the polynucleotide probe need not be identical to its target sequence in order to specifically hybridise thereto. The polynucleotide probes of the present invention, therefore, comprise a nucleotide sequence that is at least about 75% identical to a region of the target gene or mRNA. In another embodiment, the nucleotide sequence of the polynucleotide probe is at least about 90% identical a region of the target gene or mRNA. In a further embodiment, the nucleotide sequence of the polynucleotide probe is at least about 95% identical to a region of the target gene or mRNA. Methods of determining sequence identity are known in the art and can be determined, for example, by using the BLASTN program of the University of Wisconsin Computer Group (GCG) software or provided on the NCBI website. The nucleotide sequence of the polynucleotide probes of the present invention may exhibit variability by differing (e.g. by nucleotide substitution, including transition or transversion) at one, two, three, four or more nucleotides from the sequence of the target gene.

[0082] Other criteria known in the art may be employed in the design of the polynucleotide probes of the present invention. For example, the probes can be designed to have <50% G content and/or between about 25% and about 70% G+C content. Strategies to optimize probe hybridization to the target nucleic acid sequence can also be included in the process of probe selection. Hybridization under particular pH, salt, and temperature conditions can be optimized by taking into account melting temperatures and by using empirical rules that correlate with desired hybridization behaviours. Computer models may be used for predicting the intensity and concentration-dependence of probe hybridization.

[0083] As is known in the art, in order to represent a unique sequence in the human genome, a probe should be at least 15 nucleotides in length. Accordingly, the polynucleotide probes of the present invention range in length from about 15 nucleotides to the full length of the target gene or target mRNA. In one embodiment of the invention, the polynucleotide probes are at least about 15 nucleotides in length. In another embodiment, the polynucleotide probes are at least about 20 nucleotides in length. In a further embodiment, the polynucleotide probes are at least about 25 nucleotides in length. In another embodiment, the polynucleotide probes are between about 15 nucleotides and about 500 nucleotides in length. In other embodiments, the polynucleotide probes are between about 15 nucleotides and about 450 nucleotides, about 15 nucleotides and about 400 nucleotides, about 15 nucleotides and about 350 nucleotides, about 15 nucleotides and about 300 nucleotides in length. Larger polynucleotide probes, for example, of about 525, 550, 575, 600, 625, 650, 675, or 700 nucleotides in length are also contemplated by the present invention. In further embodiments, the polynucleotide probes are between about 15 nucleotides and about 100 nucleotides, about 20 nucleotides and about 100 nucleotides, about 25 nucleotides and about 100 nucleotides, and about 25 nucleotides and about 75 nucleotides in length.

[0084] In one embodiment of the invention, each of the polynucleotide probes in an HCP combination comprises a sequence corresponding to or complementary to, the sequence of an mRNA transcribed from one of the genes listed in Table 1. Representative examples of suitable probe sequences include probes comprising all or a portion of one of the sequences as set forth in any one of SEQ ID NOs: 1-4530 (Tables 20-23, below). In one embodiment, the probes comprise at least 15 consecutive nucleotides of one of the sequences as set forth in SEQ ID NOs:1-4530 (Tables 20-23).

TABLE 20
30mer polynucleotide probes, according to one embodiment

| | | | |
|---|---|---|---|
| | GenBank Accession | | |
| SEQ ID NO: | No. for target gene | Symbol | 30mer |

| | | | |
|---|---|---|---|
| 1 | AA594161 | MYH11 | tcgagacgcagacttcaatggaaccaaggc |
| 2 | AA766908 | MME | caaagttttatcaagtttgggtctgtgctg |
| 3 | AB014540 | SWAP70 | acctgttaaagggccaacagaactcttggt |
| 4 | AF196185 | PARD3 | tggtgttaccagtgtacgcgcagtgacctt |
| 5 | AI597616 | MRPL33 | ttcagaaaccctgtagcgtgtaataaaaga |
| 6 | AI634809 | ARID5B | ctacttgcttccttttagcttctgccttgc |
| 7 | AI672553 | AKAP12 | catggcatgaaataagtcaggttctttaca |
| 8 | AI809213 | RGS13 | gaaacccacaaaatcagaaacacagtacaa |
| 9 | AK022231 | STAT1 | agatggcgagaacctaagtttcagttgatt |
| 10 | AK022293 | CTSD | gtttgtatccaactccgggcaatgtggggc |
| 11 | AK055652 | C3orf6 | atgaccctaataggtctgtttagtaacagt |
| 12 | AL080130 | FLJ14001 | ccacctgaattgagcatttaggaatttatg |
| 13 | AL833316 | MIR | tgctatacactgggatgtctaattgcagca |
| 14 | AW291384 | STS-1 | gggctacaatccattgttcttagtccaata |
| 15 | BE897089 | ZNF91 | catttatatcatcctcaaccctaaatggac |
| 16 | BG993697 | SMYD3 | aagaaatgcctataaagacagacttgagtg |
| 17 | BI769730 | HLA-DRB1 | gtacgaggagcatacgccacacttatgatt |
| 18 | BQ632574 | RASA1 | aacttctgactacttgttgtatctgctgga |
| 19 | BX504817 | SFRS7 | tgttgcacttggttagctttaattgttctg |
| 20 | H53164 | IRF8 | gaacctcccagtgaaagggcagccttcatt |
| 21 | H57732 | TGFBR2 | tagacagagtacaaggtgtaattcagacag |
| 22 | L29376 | 3.8-1 | atatgtataaaaacagtagtttgggggcct |
| 23 | M80899 | ARNAK | gtgtcggtgccaaaattggagggagattta |
| 24 | NM_000038 | APC | agatcagagggtgactgatgatacatgcat |
| 25 | NM_000043 | FAS | tactaactgctctcagagaaagtagctttg |
| 26 | NM_000061 | BTK | gtgggggtggaccgaatttggcaagaatga |
| 27 | NM_000075 | CDK4 | acactcgtgttcatgttggtgcgatcgggg |
| 28 | NM_000109 | DMD | aacaaggggttactttacatcctactaaga |
| 29 | NM_000189 | HK2 | cggggtgtgatgaatagcgaatcatctcaa |
| 30 | NM_000237 | LPL | caagaaagaaacgtacttaactgtgtgaag |
| 31 | NM_000269 | NME1 | cccgtcttaccgctagttccctgcatagca |
| 32 | NM_000271 | NPC1 | aaagaaagcatctcgtaggtgtgtctactg |
| 33 | NM_000295 | SERPINA1 | cccaaactaatctaggaatcactgtctaac |
| 34 | NM_000313 | PROS1 | cattcatagccagatgtgtatcagatgttt |
| 35 | NM_000397 | CYBB | caactaagttatgaaagtagagagatctgc |
| 36 | NM_000405 | GM2A | actatagaatcccatacacaacggaatcac |
| 37 | NM_000424 | KRT5 | tatccttttctggagagtagtctagaccaa |
| 38 | NM_000483 | APOC2 | cgaagcgtacggagcagtaagacacataag |
| 39 | NM_000576 | IL1B | attcgctcccacattctgatgagcaaccgc |
| 40 | NM_000579 | CCR5 | gagagtgcaacagtagcataggaccctacc |
| 41 | NM_000584 | IL8 | cagccaaaactccacagtcaatattagtaa |
| 42 | NM_000585 | IL15 | ggctctcattgacttccttactaagcatag |
| 43 | NM_000600 | IL6 | cagtacacccgcccgttcttactgctaaaa |
| 44 | NM_000626 | CD79B | cgtggaataaacggtgtgtcctgagaaacc |
| 45 | NM_000627 | LTBP1 | gatgatccccaatatatctaccattgtatg |
| 46 | NM_000633 | BCL2 | caccattagctataatggcactttgtttgt |
| 47 | NM_000655 | SELL | gtttccttttatgagacccattcctatttc |
| 48 | NM_000713 | BLVRB | agagagagtagcgtgcggactagcaacgca |
| 49 | NM_000785 | CYP27B1 | tctgccctagcctggtttacggtttcttat |
| 50 | NM_000788 | DCK | gtggaattaaaggaatccctagaataagga |
| 51 | NM_000853 | GSTT1 | gtggtgcactcctataaaaattgaagctgc |
| 52 | NM_000877 | IL1R1 | agcatgcatcacggatcaatagactgtact |
| 53 | NM_000917 | P4HA1 | tacgttgtcagaattggaatgacaaacagg |
| 54 | NM_000927 | ABCB1 | actttcatgtgactggagtcatcttgtcca |
| 55 | NM_001067 | TOP2A | cagcaatgagctattagattcattttggga |
| 56 | NM_001068 | TOP2B | atctttggtgaccctctcggttctgcttct |
| 57 | NM_001110 | ADAM10 | tttcttacgtacactgtacttctgtgtgca |
| 58 | NM_001154 | ANXA5 | cctggatgttaaacagatcaatctcactcc |
| 59 | NM_001166 | BIRC2 | tctcttatttctccccctagtttgtgagaa |
| 60 | NM_001196 | BID | ctgcctgctgtaagaccatcctctatggtt |
| 61 | NM_001230 | CASP10 | agtcctgtggttaacgccttcatttataga |
| 62 | NM_001238 | CCNE1 | acattatcagttgacagtgtacaatgcctt |
| 63 | NM_001242 | TNFRSF7 | gagtgttgtggccgtgaggacttttctgtc |
| 64 | NM_001254 | CDC6 | cataaggagactataactctacagattgtg |
| 65 | NM_001350 | DAXX | agggatggactaagctaatccccttttggt |
| 66 | NM_001425 | EMP3 | atagatcttgttcccccccgcacctttccc |
| 67 | NM_001552 | IGFBP4 | gaaggagacttaggaacctaccagttggcc |
| 68 | NM_001558 | IL10RA | atgtgccttgaacacaaagctctgtcaata |
| 69 | NM_001618 | PARP1 | gaaggaacgctaacaatttctcatacttag |
| 70 | NM_001621 | AHR | gatttagaccagaggtctagattaatactc |
| 71 | NM_001647 | APOD | taacagggtagggcatggttacatgtttag |
| 72 | NM_001663 | ARF6 | attattgaatgttgcaggtgagatgtggtt |
| 73 | NM_001706 | BCL6 | gcgtcatgcttgtgttataactactccgga |
| 74 | NM_001760 | CCND3 | ggaccatcatcctactgtaataaagatgat |
| 75 | NM_001762 | CCT6A | cacccaaattacgtttccacgagattattt |
| 76 | NM_001770 | CD19 | atctgaagacctcgagcagatgatgccaac |
| 77 | NM_001771 | CD22 | agacgtacgtatcagcggccccttgactct |
| 78 | NM_001779 | CD58 | gaataggagggtaattaagactcctggtct |
| 79 | NM_001781 | CD69 | tgtagacaggtccttttcgatggtacatat |
| 80 | NM_001782 | CD72 | ccccccaagaacttcccatggtagaatggg |
| 81 | NM_001826 | CKS1B | gatgaaacccctgcacactattgtcagtaa |
| 82 | NM_001827 | CKS2 | cataaaataatcgttccccggattctctca |
| 83 | NM_001831 | CLU | ggtcagaggtatttgcttaagtgatcataa |
| 84 | NM_001852 | COL9A2 | cttctctttctcgcataactccccacccct |
| 85 | NM_001853 | COL9A3 | cagattaatgactggctacagagtaacaaa |
| 86 | NM_001877 | CR2 | cactcagtgattgcaatttgcacaagtttt |
| 87 | NM_001888 | CRYM | aaagcaaagctaggtagccatttcttctgt |
| 88 | NM_001894 | CSNK1E | ctgggttttggattaacccatccttcctag |
| 89 | NM_001951 | E2F5 | aaaatgtgccaatgcctgtacattaacaga |
| 90 | NM_001967 | EIF4A2 | gcctgtaaccttacagtgtattcctaataa |
| 91 | NM_002002 | FCER2 | tgagtatccccagctcaggtggtgagtcct |
| 92 | NM_002051 | GATA3 | gatcactgcctttaatacagtctgttggaa |
| 93 | NM_002095 | GTF2E2 | gtttgcccatagtcttgaatgcaatatttg |
| 94 | NM_002101 | GYPC | actgagcatacccagtgggccaacaagcac |
| 95 | NM_002105 | H2AFX | gttccacccaagccaatttcagacccttcg |
| 96 | NM_002120 | HLA-DOB | agacaaatgctcaggtagtcactgtttcct |
| 97 | NM_002122 | HLA-DQA1 | agccacccggctacctaattcctcagtaac |
| 98 | NM_002155 | HSPA6 | gtcagggctatgctatgggccttctagact |
| 99 | NM_002189 | IL15RA | cagcgtttgggcttctaaccaccctgtctc |
| 100 | NM_002211 | ITGB1 | cactagtcacattcttgttttaagtgcctt |
| 101 | NM_002217 | ITIH3 | ggatggatggcccggattttatggcatctg |
| 102 | NM_002250 | KCNN4 | ttacaagtgcaggcgactggaggcaggact |
| 103 | NM_002305 | LGALS1 | ggagacttcaagattaagtgcgtggccttt |
| 104 | NM_002350 | LYN | tcaagcggttctgttcactaaatttttctc |
| 105 | NM_002358 | MAD2L1 | tgtcgacccacaatcactcacggcgcgtaa |
| 106 | NM_002426 | MMP12 | gtccattcttgcttgactctactattaagt |
| 107 | NM_002467 | MYC | ctcaaattggactttgggcataaaagaact |
| 108 | NM_002526 | NT5E | ggccagtaaaatagggtaaatcctattaga |
| 109 | NM_002567 | PBP | tgacgagaagagctagtaatcacctgcaca |
| 110 | NM_002646 | PIK3C2B | tgctcctgatttaaagagatctgtgtactg |
| 111 | NM_002661 | PLCG2 | aactggcatgagttggggtaatttcctatt |
| 112 | NM_002692 | POLE2 | tcactacgacaaataccgaatgcctctgca |
| 113 | NM_002738 | PRKCB1 | agttactgtgaactattgtctcttggagga |
| 114 | NM_002752 | MAPK9 | ctgcttctgaagttatctcttaatcctctt |
| 115 | NM_002832 | PTPN7 | acgactgtctatgccaatgaggctcggtgg |
| 116 | NM_002838 | PTPRC | gcatgctcgattattccctgtacaatattt |
| 117 | NM_002891 | RASGRF1 | tgaatttctgcaccgtttcagacttcgccc |
| 118 | NM_002892 | ARID4A | tgcccaggattgaaggtgtaaatgggacaa |
| 119 | NM_002943 | RORA | gtcatggtattcttcattactgtgcagttg |
| 120 | NM_002966 | S100A10 | gtccacttaccacccactttgtgtttcctt |
| 121 | NM_002967 | SAFB | gttctgttaggagttaccttaaactgtgta |
| 122 | NM_003037 | SLAMF1 | cctaggttcagatcttaacttggccactta |
| 123 | NM_003088 | FSCN1 | ctaaacgcccatgatagtagcttcaaactg |
| 124 | NM_003177 | SYK | cccaaggatgccttagcatgtgactcctga |
| 125 | NM_003217 | TEGT | cctgttaactctccataaatttggtgattc |
| 126 | NM_003226 | TFF3 | ggtggccacacataagctcatcagcataga |
| 127 | NM_003243 | TGFBR3 | aaagggcactcatttggattgccttacttc |
| 128 | NM_003254 | TIMP1 | gatctcataacgctggtataaggtggtctg |
| 129 | NM_003290 | TPM4 | cttggttatcctcttccaatgtgaggacac |
| 130 | NM_003299 | TRA1 | ttgttttggatgccccctaatccccttctc |
| 131 | NM_003332 | TYROBP | cccaatactctcctaaaataaacatgaagc |
| 132 | NM_003362 | UNG | gagttggctctacgcgaggtttgttaataa |
| 133 | NM_003451 | ZNF177 | ttaaaccactcttgtgggaagttcctcttt |
| 134 | NM_003648 | DGKD | ggtggggcttaccccctcgtatttataatc |
| 135 | NM_003656 | CAMK1 | tggcccccactctcatagatgtcatccagg |
| 136 | NM_003810 | TNFSF10 | actaaaagatcgcagtttgcctggtgcagt |
| 137 | NM_003875 | GMPS | caacacctggcaatgagatccctgtagagg |
| 138 | NM_003959 | HIP1R | aggaatgtcgcccattactcctcaggcctg |
| 139 | NM_004049 | BCL2A1 | gttgcggagttcataatgaataacacagga |
| 140 | NM_004073 | PLK3 | ccagctagggggcgttatttatggaccact |
| 141 | NM_004091 | E2F2 | ttatgagcaccatgtaagcctccttgtatt |
| 142 | NM_004117 | FKBP5 | aggctgcatatggattgccaagtcagcata |
| 143 | NM_004126 | GNG11 | tcacccaagagccataatacacctattata |
| 144 | NM_004184 | WARS | caggcctcatttcatcacgcagcatgtgca |
| 145 | NM_004271 | LY86 | gagatcaccgacatcatgacacagacacac |
| 146 | NM_004289 | NFE2L3 | aagatcacacttgtgggcaatctgggggag |
| 147 | NM_004322 | BAD | gagtccacaaactcgtcactcatcctccgg |
| 148 | NM_004354 | CCNG2 | cagtaatagataagtgagacagattgcttg |
| 149 | NM_004356 | CD81 | acaacatcctgactccgtcatttaataaag |
| 150 | NM_004358 | CDC25B | gggagcgttttgttgagcatgacagcctgc |
| 151 | NM_004422 | DVL2 | atccattgggccccttctaaccccagaatg |
| 152 | NM_004445 | EPHB6 | tgagaatgacgatacccgtgactcagccct |
| 153 | NM_004510 | SP110 | gttcagatcagataaagcttcttcgggctg |
| 154 | NM_004529 | MLLT3 | agaaggatttcttgtattggtgaaagacgg |
| 155 | NM_004556 | NFKBIE | ggtcacccctatgctggcatgaagagcatg |
| 156 | NM_004577 | PSPH | tcttagaaatacggattcggcagccttcag |
| 157 | NM_004619 | TRAF5 | agccttacgggagcacatgcgtttggtttt |
| 158 | NM_004635 | MAPKAPK3 | atgtcagataggacaacactgctgggtttt |
| 159 | NM_004737 | LARGE | agttgcaatgtgaccagcgaaagctgcatt |
| 160 | NM_004844 | SH3BP5 | tttccctaactccagttattctgctgctgc |
| 161 | NM_004851 | NAPSA | cgcggaggtcctgctacccagtaaaaatcc |
| 162 | NM_004951 | EBI2 | tttggaataaagagcaggatgctgcaaagt |
| 163 | NM_005013 | NUCB2 | aatatcatcaggtcatacagcagatggaac |
| 164 | NM_005077 | TLE1 | ttccttgcagttcacctcactttccgtcct |
| 165 | NM_005127 | CLECSF2 | cctcaaaactttactagggccaataaactt |
| 166 | NM_005211 | CSF1R | agtcacgccgtgggatgtctctgtccacat |
| 167 | NM_005213 | CSTA | caggtatcattttggctgattgcttctttg |
| 168 | NM_005214 | CTLA4 | ggcccaattcttacaaacatgtggttaatg |
| 169 | NM_005271 | GLUD1 | acagtagtgtccccatgaagtgctagataa |
| 170 | NM_005292 | GPR18 | cactaactactctggcgtcaatggatattc |
| 171 | NM_005347 | HSPA5 | ccacctagtctgtaactctttctgaggagc |
| 172 | NM_005348 | HSPCA | taaaagcctacctaagcatatcgtaaagct |
| 173 | NM_005415 | SLC20A1 | ccatgttcatttgtctacctcttaactgaa |
| 174 | NM_005449 | TOSO | gaacgtctacttatctcaagttctatgcta |
| 175 | NM_005461 | MAFB | gttgaaatcaaacctgccgcaacagaaatt |
| 176 | NM_005531 | IFI16 | caccatatatactagctgttaatcctatgg |
| 177 | NM_005582 | LY64 | catcagcccccacaatttgtcagagctgaa |
| 178 | NM_005601 | NKG7 | agctaccaccctcgtatttatcatacacac |
| 179 | NM_005606 | LGMN | ttttattgaagagggccgcaagccccaaat |
| 180 | NM_005610 | RBBP4 | tctctagcccactttatatcctgccaccag |
| 181 | NM_005623 | CCL8 | ctttggcaatcagtgctcctgtaagtcaaa |
| 182 | NM_005638 | SYBL1 | tgacatagatcttaggcccacttgaactct |
| 183 | NM_005652 | TERF2 | tgttcgtgtcttgcactggaattcaacatt |
| 184 | NM_005658 | TRAF1 | tggtaaccctgggcctattgaaagcaggat |
| 185 | NM_005856 | RAMP3 | tcatgatgctgtgcccgctatgggctgtgt |
| 186 | NM_005935 | MLLT2 | tgattttgtacatagggtagggaagcagtg |
| 187 | NM_005950 | MT1G | cacataccagcaccactactcacactacag |
| 188 | NM_005951 | MT1H | gcgaggaacacgcacacgttctgtgcaaac |
| 189 | NM_006006 | ZBTB16 | agagaagacgtacctctacctgtgctatgt |
| 190 | NM_006014 | DXS9879E | atatacgcgaatgaggcgccctatacccgc |
| 191 | NM_006115 | PRAME | tgttgacttgaggagttaatgtgatctttg |
| 192 | NM_006162 | NFATC1 | gtgcagcctttctcaggggactgtcattga |
| 193 | NM_006164 | NFE2L2 | tttgcctgtcacgtttgagtgttcctgggc |
| 194 | NM_006195 | PBX3 | acttactacctctgaacaatactcacgctg |
| 195 | NM_006218 | PIK3CA | cagggtttgatagcacttaaactagttcat |
| 196 | NM_006254 | PRKCD | tggaccagtctgcattcgctggcttctcct |
| 197 | NM_006257 | PRXCQ | aagatcaatggcccatgcatgctgtttgca |
| 198 | NM_006274 | CCL19 | gccgcagcagttaacctatgaccgtgcaga |
| 199 | NM_006317 | BASP1 | ttctcatgacgagttaatgcatgtccgtgg |
| 200 | NM_006332 | IFI30 | aaattccaccccatgatcaagaatcctgct |
| 201 | NM_006475 | POSTN | acataaaatgcacgcaagccattatctctc |
| 202 | NM_006498 | LGALS2 | aactggcttacgctgttggcacatttcctt |
| 203 | NM_006558 | KHDRBS3 | gattgacttacatactacagcacatgtact |
| 204 | NM_006620 | HBS1L | tattgaggaattctcatagctctgccttat |
| 205 | NM_006644 | HSPH1 | gtctgtagtctttatgatcctaaaagggaa |
| 206 | NM_006734 | HIVEP2 | acagagggtcgcacttggactctgagggtt |
| 207 | NM_006761 | YWHAE | ggtttggggagggacttcgttgtaatggtt |
| 208 | NM_006763 | BTG2 | ggaagaatgtacagcttatggacaaatgta |
| 209 | NM_006841 | SLC38A3 | tgaggtgacacagcctgtaggaacatacac |
| 210 | NM_006889 | CD86 | gccttgattagactcctagcacctggctag |
| 211 | NM_006892 | DNMT3B | cggatgcctagagtttaccttatgtttaat |
| 212 | NM_006986 | MAGED1 | tagagagccacatcctgttgactgaaagtg |
| 213 | NM_007311 | BZRP | ttctgcatgcttagagcatgttcttggaac |
| 214 | NM_007360 | KLRK1 | atttgtacttgcttgagtcccatgactgtt |
| 215 | NM_007361 | NID2 | tcctgtagtgcctctatagaagtacccaca |
| 216 | NM_012203 | GRHPR | ggacacatttgcgccaaaagtatggtaatt |
| 217 | NM_012448 | STAT5B | tcctatgcagagttacagtcacaaagttgt |
| 218 | NM_012452 | TNFRSF13B | cagtgcagctgtaggtcgtcatcacctaac |
| 219 | NM_013230 | CD24 | aatgaacactcttgctttattccagaatgc |
| 220 | NM_014246 | CELSR1 | agacctcttgatgttttcccactggtccct |
| 221 | NM_014257 | CD209L | tgcatttagggggcgggcttggtatgttgt |
| 222 | NM_014338 | PISD | ttgattcagggtctgtcttggaggcagagg |
| 223 | NM_014456 | PDCD4 | gttaagtaaaaggtggctggaacatctatt |
| 224 | NM_014686 | KIAA0355 | agactgtgtgaagccgtttgtgtggtctcc |
| 225 | NM_014762 | DHCR24 | gttttggatggagttaaacttgatgccagt |
| 226 | NM_015187 | KIAA0746 | tgcaatattgtgggtccaaactactctttg |
| 227 | NM_015641 | TES | gtccatggatatatcaaatgtcttcacttg |
| 228 | NM_015866 | PRDM2 | ccttcaacgctcccagacggtcaggaaaac |
| 229 | NM_016076 | PNAS-4 | gatatagcattgggctatcatgttacaaca |
| 230 | NM_016081 | KIAA0992 | tgctgggtttgggattaactagcattattt |
| 231 | NM_016187 | BIN2 | tctgtctttgacttacgacccattttgcaa |
| 232 | NM_016336 | UBE2J1 | agttgccttcagaactagtttgagctgctc |
| 233 | NM_016628 | WAC | gatttcttgtagatgtatccttcacgttgt |
| 234 | NM_017530 | LOC55565 | gtgggctctacgtcgacagaatgagccttt |
| 235 | NM_017784 | OSBPL10 | ttttagcctttacacatgaggtcaaaggag |
| 236 | NM_017935 | BANK1 | ccagtcattattgttacatcatgtttgcag |
| 237 | NM_017955 | CDCA4 | atcctcatggaccctagtttaaagggtatg |
| 238 | NM_018442 | IQWD1 | attttccctaaccttcaaatgtgggagctt |
| 239 | NM_018842 | BAIAP2L1 | ttctctgtttcacgtagttgggttgacaag |
| 240 | NM_020151 | STARD7 | gtctgtacagttactcatgtcattgtaatg |
| 241 | NM_020199 | C5orf15 | tcttgggcggacagtgtactttcctaatag |
| 242 | NM_020529 | NFKBIA | tacacttgtatgtggccgtccacggcagca |
| 243 | NM_020992 | PDLIM1 | aacccaatcaaatataacgtgtctgacact |
| 244 | NM_021813 | BACH2 | gcattgctatgaactaatggaattggaact |
| 245 | NM_021822 | APOBEC3G | caatttgaatcggttttgtaggtagaggaa |
| 246 | NM_021950 | MS4A1 | ctctaaatagccaacacccatctgtttttt |
| 247 | NM_021966 | TCL1A | actctgctcgccttagcactaccactcctg |
| 248 | NM_022552 | DNMT3A | tctcactttagccaattcgagggctccttg |
| 249 | NM_023037 | 13CDNA73 | tgaaaagggaattgtaaatggactgcaatg |
| 250 | NM_024708 | ASB7 | ttttgtaccctggtggtcgagtcttccctt |
| 251 | NM_025113 | C13orf18 | gtgaactgtaactgacaagatgaattactc |
| 252 | NM_025216 | WNT10A | gcgagacacaacacttgtcctcttggaggt |
| 253 | NM_030666 | SERPINB1 | aagacaagcttgcctcgcctgacttttctg |
| 254 | NM_030764 | SPAP1 | ctgaacctgcaatatcaccaaagtatgcat |
| 255 | NM_030775 | WNT5B | tctgccccaggtgtacggtttctctctgac |
| 256 | NM_031305 | ARHGAP24 | tgggttcaaatggtatacaatttgccagct |
| 257 | NM_031942 | CDCA7 | gaccttgaatcgataagtgtaaatacagct |
| 258 | NM_032991 | CASP3 | gctcaaaaaatgagctcgcatttgtcaatg |
| 259 | NM_033208 | TIGD7 | cagagattccacttcacactgaaagagatg |
| 260 | NM_033274 | ADAM19 | ttatttgggagattgttcacggaaaacaga |
| 261 | NM_057735 | CCNE2 | cttgctgtacataggctagctatttctaaa |
| 262 | NM_078467 | CDKN1A | ttctccacctagactgtaaacctctcgagg |
| 263 | NM_079421 | CDKN2D | tccagtctcttgtacagcgttttaaaagaa |
| 264 | NM_080593 | HIST1H2BK | tgttccgatagtgtctcgcgggcgaaacca |
| 265 | NM_138340 | ABHD3 | ccagtattgtgtctaaattctgtggatgat |
| 266 | NM_138379 | TIMD4 | tgactattaacggcgggcgaaacgaaaata |
| 267 | NM_139207 | NAP1L1 | agttttaagggacgtcagtgtttatgccat |
| 268 | NM_139276 | STAT3 | cccgtgggttgcttacctacctataaggtg |
| 269 | NM_144646 | IGJ | taagtcattgctgactgcatagctcttttt |
| 270 | NM_145804 | ABTB2 | ctgacacctgtcatatttatggaccagaca |
| 271 | NM_152785 | GCET2 | ggactaagacactacccatataattcccag |
| 272 | NM_172373 | ELF1 | cttgggctaatctggctgagtagtcagtta |
| 273 | NM_173624 | FLJ40504 | caaatctcatgaccttgccaaaatcttggc |
| 274 | NM_175870 | LOC90925 | cccgcggagtaacctggcgacatatttaga |
| 275 | NM_177968 | PPM1B | ctgtactgatagtacttcccagtatgatat |
| 276 | NM_181443 | BTBD3 | cagctaattcaagacactgtagtcacttgt |
| 277 | NM_181838 | UBE2D2 | tttcctaattgtaaactaggccaacctgaa |
| 278 | NM_182746 | MCM4 | acctcattggtaaagggctagagcctttct |
| 279 | NM_182776 | MCM7 | ctgcacttactccttttgctaataaaagtg |
| 280 | NM_198833 | SERPINB8 | ctcctgtcactcagtacaattattttgaga |
| 281 | NM_201593 | CACNB2 | caaaggtaactaggaaagcattcatctgct |
| 282 | R99527 | MGC39372 | tcgtctctgtagtgatgacttcctgtcctc |
| 283 | T66903 | LOC54103 | atttgcagcagggtttgtctttgtgaattc |
| 284 | U37028 | ITGAD | agaagaagacgaggtctacaatgccattcc |
| 285 | W56129 | SFRS9 | actgtgactgagtcggcccattctgtttag |
| 286 | X58529 | IGHM | tgggagtggtcgattatgtactactttgac |
| 287 | AA188785 | LOC286025 | aatgcagtatagttaaaatggcttcccaca |
| 288 | AA347638 | BCR | gaagggaacgtgaccggattccctcactgt |
| 289 | AA601122 | SECTM1 | aataaggttccgtccgcgtgctgggtcaga |
| 290 | AA642467 | SLC2A14 | gttctggtcaatcatgttgaaagcctcctt |
| 291 | AA682722 | LARP | tcatagaaggctctggtggtacctctgggc |
| 292 | AA757235 | LOC399933 | ccaactctgtggcataacctcaaagccata |
| 293 | AA765313 | FZD3 | ttgggttacttcagatgcctaacaccttcc |
| 294 | AB002310 | HUWE1 | gctatccaggagtgctctgaaggctttggg |
| 295 | AB002333 | ZNF518 | gctttgtgctccagatattctagttggaac |
| 296 | AB0244O2 | ING1 | cccaccatctgtttgaagattatatgaagt |
| 297 | AB028952 | SYNPO | agccttgagaaaccggcagttcccaagcca |
| 298 | AB032991 | NDFIP2 | tgtgaaattaggttggggttgcaacatctt |
| 299 | AF008915 | EVI5 | agtttttacatcacatccattgatctgcct |
| 300 | AF108138 | C15orf20 | acagagaacggaacttaggtgtgtctctac |
| 301 | AF116668 | LMO2 | tgactttgacgcttgcgaactagagatgtg |
| 302 | AF143327 | FLJ32810 | gctacagtggatctattcaaagcttaactt |
| 303 | AF200348 | D2S448 | gctgtaacaggagtggaatgtacatattta |
| 304 | AF245480 | MONDOA | cttcaaaatgctgacgctttggagagtaag |
| 305 | AO075159 | SPTA1 | agctattttgtatgcaactagtcactgctg |
| 306 | BU948323 | TCF4 | agcacaaaaatttagtctgctggctgactg |
| 307 | AI523104 | LILRB1 | tttcctataagaaatttagggcagggcacg |
| 308 | AI675029 | C7 | ctctgtattgttctgaccctggtaaatata |
| 309 | AI694012 | PSMA5 | tagtaaaaagtaataattaggcccaggcac |
| 310 | AI732248 | COL4A1 | gctagtattgccacagacgcattaaaagaa |
| 311 | AJ007509 | HNRPUL1 | cttccccttgactcatatgttttaacatga |
| 312 | AK022224 | ACTN1 | gtttgctagctcacttgtccatgaaaatat |
| 313 | AK023928 | PSCD1 | tggatgcattttgtggtgggccccctagag |
| 314 | AK024580 | NRP1 | gtttcaaaatgaacagcgaagccttaactt |
| 315 | AK025005 | MARCH1 | ctagtataccctgtcaatacaactttcatc |
| 316 | AK091853 | COL3A1 | actttgtaagcttgtatgtggttgttgatc |
| 317 | AK126650 | CAPZB | acatttccatagagaccgtgtggtttttgt |
| 318 | AK127124 | ARHGEF4 | ttagggaggagtgcctactacccaaagaaa |
| 319 | AK127132 | DRG1 | agaaacaggatgccccagtaaacatgattt |
| 320 | AK129940 | GNAI1 | tggtaagtagtttccaagttacgtgttgtc |
| 321 | AL049313 | CLIC5 | tttcctacaatctgactcaactgccaggtg |
| 322 | AL049327 | CBLB | ttgcttagatgatgacgttgtggattcatt |
| 323 | AL049449 | GAB1 | gatcaggtttagacaatgagctttggttgt |
| 324 | AL050391 | CASP4 | gcaccttcattagtacagcttgcatattta |
| 325 | AL137527 | LRCH3 | ttgctttcaccctgcggtattgttttccct |
| 326 | AL353942 | SEPT11 | atatcactagtgccaagacataaagcgggg |
| 327 | AL833915 | TDRD9 | gtgtctgggtgttacagtctgtgcccactg |
| 328 | AL834278 | USP30 | atagctgtgcaaagccttttaacctgactt |
| 329 | AU252485 | MAP7 | tggttgaactgctaggttgaatgagagact |
| 330 | AV650179 | PRG1 | gaaaaagctcccacagtatgtggcgtctga |
| 331 | AV686223 | KIAA1407 | cactcagtttgtcttctagtactcagctca |
| 332 | AW014009 | MAP2K3 | cgagccatttgtcccaagtgccaaagaagc |
| 333 | AW190768 | SLC13A3 | ctggggattccacagagttgacctctctga |
| 334 | AW292143 | GFAP | atgtacccagtattctaggtagtgccctat |
| 335 | AW439398 | CCND1 | cagcaccaacatgtaaccggcatgtttcca |
| 336 | AW452039 | HRMT1L3 | ccaaatgtaactcccacattgagtttatct |
| 337 | AW615076 | LOC4923O4 | aaggttcctcaattttgcgaaaggggcaac |
| 338 | AW664012 | ALOX5 | taagacttagaataaggaggtggggaatgt |
| 339 | AW967479 | CD38 | agaaacaacgcaaccgacgacgcacaacgc |
| 340 | AW970654 | PHTF2 | aactgttgtttctttgccacatgtgttgta |
| 341 | BC028066 | NALP1 | agcgctctaaccctgcatattatttacttg |
| 342 | BC034289 | LOC87769 | tggaataaatgacgacgtaaacgtagctgc |
| 343 | BC042366 | PCDH9 | ggggtgtttgatgactttgacagaataaat |
| 344 | BC045532 | LSM8 | catttccctgcttaccatagggattttaaa |
| 345 | BC050383 | TMPO | ccagcacacaattttgatttcaattagcct |
| 346 | BC050602 | HIST1H2AC | catgtgtatgaattgttggtgctctaaaga |
| 347 | BC058855 | VEGF | gcagtttttcgagatattccgtagtacata |
| 348 | BE147267 | ECE1 | ccatgtctatctcaggggcccgttacctct |
| 349 | BE549606 | BZW1 | ttaacaagttaatcaggcgctacaaatacc |
| 350 | BE798965 | LAMC1 | aattccaactgtggaccttttatatgtgcc |
| 351 | BE927772 | SFRS3 | ggtacattgtagagccgaactttgagttac |
| 352 | BF055235 | RIPK1 | ttactacttggccaccacgcagccttggct |
| 353 | BF513638 | WNT3 | acctgaggcttatctttgcacatgttaaag |
| 354 | BF848289 | CSDA | tgtggaagggagtcgttacgctgcagatcg |
| 355 | BG682263 | HDAC3 | atgaacgggtagacaaggactgagattgcc |
| 356 | BG683220 | PMS2 | cactgctggatgttgaaggtaacttaataa |
| 357 | BG747999 | MT1L | gagaatacaacaacgatgcggcacgaggaa |
| 358 | B1493513 | PHF8 | cctccctttcctatagagataaaagtgatt |
| 359 | B1559738 | GPR56 | atcagctgttgtaatcacctagcaaactgg |
| 360 | BM709325 | BCL7A | ccatcagtagatatggtttgtacaatgtac |
| 361 | BM711190 | MED28 | cacccatgagaattagacattattctcctt |
| 362 | BM727177 | GOLT1B | gtcttacctctcaataaaagggtacttttc |
| 363 | BQ009245 | GPM6B | gtggaaatagttgtggatgtactaagagta |
| 364 | BQ021469 | AGPS | ttagtgacccactgaccgtatttgaacaaa |
| 365 | BQ215285 | LEF1 | ctttgctagctaacctgactccgggtgagg |
| 366 | BQ898221 | ITGA6 | tttcgtaacacagcattgtatatgtgaagc |
| 367 | BU929213 | SESN3 | tgactaaagctgacctaaatggatcagttt |
| 368 | BU954396 | RPL11 | gggatcatccttcctggcaaataaattccc |
| 369 | BX095432 | CNTN5 | ttgatcgttggtgggttgctagcctttcag |
| 370 | BX640908 | EVI1 | tcagtgcattactatgggaggagcaactaa |
| 371 | BX648339 | USP53 | ccaactacttttcatgaagagtgctttgaa |
| 372 | BX648365 | SEPT7 | accaacctgtttctacctatatgcagtctc |
| 373 | BX649193 | TKT | ctgagaggaggggtaaatatatgttttgag |
| 374 | C05886 | ETV6 | cctgcaaaccagaacgactctagaatttcc |
| 375 | D31762 | TRAM2 | gacagtaaatataataccgctgtttccttg |
| 376 | D86967 | EDEM1 | attaccttagccacagggtggctgagcagg |
| 377 | H41942 | NPEPPS | tggtgtggcttaacggtatttcagaaggtc |
| 378 | M60028 | HLA-DQB1 | acacttttgatattagcccccgcgggaccc |
| 379 | M77810 | GATA2 | cctctctgaaatagccgaactccaggctgg |
| 380 | N26272 | MSI2 | aggataccagaccactgtaatcaataagaa |
| 381 | N28431 | COL6A1 | gatgtgttcgacgttttatcaaaggccccc |
| 382 | N41620 | WWP1 | caggtgcttgaacttgtcagtttgttttaa |
| 383 | N53163 | COL27A1 | ctggaagttggacctgcgtgcttcctctga |
| 384 | N54946 | EWSR1 | gcagagatcggccctactagatgcagagac |
| 385 | N70000 | UBE3B | cttatggattgagatgtgatcaaaggcttt |
| 386 | NM_000016 | ACADM | aaagacttattgtagcccgtgaacacattg |
| 387 | NM_000022 | ADA | atatccacgtcacggatgcttccatgcccg |
| 388 | NM_000024 | ADRB2 | tcccgagcaaaggtctaaagtttacagtaa |
| 389 | NM_000033 | ABCD1 | ttccgtgggatgccataaaagccgcccagt |
| 390 | NM_000062 | SERPING1 | catggccctgccatgctctccaaaccactt |
| 391 | NM_000089 | COL1A2 | ctgtattgagttgtatcgtgtggtgtattt |
| 392 | NM_000099 | CST3 | ctcaaataggccagaacaactcactaatta |
| 393 | NM_000110 | DPYD | gaacaaagctcaaagtatgcaatgcttcat |
| 394 | NM_000118 | ENG | gaacttgcctaactaactggcaggggagac |
| 395 | NM_000120 | EPHX1 | ccaactccgtgtggtaagcaacatggcttt |
| 396 | NM_000147 | FUCA1 | gccaaaattcgctatgtttacagtgatact |
| 397 | NM_000169 | GLA | aggaagctagggttctatgaatggacttca |
| 398 | NM_000182 | HADHA | accacggtgtaccgggatattaaacctctt |
| 399 | NM_000194 | HPRT1 | ttaccagtgaatctttgtcagcagttccct |
| 400 | NM_000214 | JAG1 | gattcccttgttattcaacagcaagtgtga |
| 401 | NM_000234 | LIG1 | tggacggaccccagggttattattgccttt |
| 402 | NM_000239 | LYZ | atagatcttaggcaaaataccagctgatga |
| 403 | NM_000246 | MHC2TA | aatcgtgacaacacttgtgttatgaagcat |
| 404 | NM_000249 | MLH1 | gttggtagcacttaagacttatacttgcct |
| 405 | NM_000251 | MSH2 | agcatgtaatagagtgtgctaaacagaaag |
| 406 | NM_000277 | PAH | gcataatggtaaatcttttggggtcatctt |
| 407 | NM_000305 | PON2 | tttattccagtaaggaacggcccttttagt |
| 408 | NM_000314 | PTEN | atgatgcacttattcaatagctgtcagccg |
| 409 | NM_000341 | SLC3A1 | cttgaatgtaaccgctttaagaaaggttct |
| 410 | NM_000361 | THBD | tcattaaatggggctcacaaaccatgcaaa |
| 411 | NM_000382 | ALDH3A2 | caatcctttgatcataaattctccccaact |
| 412 | NM_000395 | CSF2RB | cataagtggttaagcaagtattctcgttac |
| 413 | NM_000417 | IL2RA | acactggtagaacgtaaccacggaaaagag |
| 414 | NM_000418 | IL4R | ggttgagtaatgctcgtctgtgtgttttag |
| 415 | NM_000435 | NOTCH3 | agccttatggcagaatagaggtatttttag |
| 416 | NM_000448 | RAG1 | ataagaggcaggatatataagcgccagtga |
| 417 | NM_000484 | APP | gaatgattggcttgagatagattggtggaa |
| 418 | NM_000485 | APRT | tggatcccagggaaatatcagccttgggca |
| 419 | NM_000536 | RAG2 | ttggattatgcccatgaacaagttagtttc |
| 420 | NM_000545 | TCF1 | cttcagtgtaccgcgtctaccctgggattc |
| 421 | NM_000546 | TP53 | tgacaacctcttggtcgaccttagtaccta |
| 422 | NM_000561 | GSTM1 | tgagacgcacacacattctaacctcccgcc |
| 423 | NM_000574 | DAF | ctgaatcgagatgtccatagtcaaatttgt |
| 424 | NM_000578 | SLC11A1 | tgcggagcctgtaataattgagggacaggc |
| 425 | NM_000594 | TNF | ccctactattcagtggcgagaaataaagtt |
| 426 | NM_000598 | IGFBP3 | acacacgctgcatagagctctccttgaaaa |
| 427 | NM_000601 | HGF | catgcaagtgtaataacatatctcctgaag |
| 428 | NM_000604 | FGFR1 | ttttaaaagggtcgttaccagagatttacc |
| 429 | NM_000610 | CD44 | cctgggctaagtcatttaaactgggtcttt |
| 430 | NM_000628 | IL10RB | ccctggacttagccaccagagagctacatt |
| 431 | NM_000629 | IFNAR1 | ctttcaggattagttcgttccaaggaggct |
| 432 | NM_000640 | IL13RA2 | actcaacagtttccagtcatggccaaatgt |
| 433 | NM_000660 | TGFB1 | cattaatgaactcattcagtcaccatagca |
| 434 | NM_000700 | ANXA1 | atcaggattatggtttcccgttctgaaatt |
| 435 | NM_000701 | ATP1A1 | gtaaaaaaggaacacccggaaagactgaaa |
| 436 | NM_000717 | CA4 | gggactttaggcatgattaaaatatggaca |
| 437 | NM_000729 | CCK | tgagaggcagctgcgtttctgcaacctatg |
| 438 | NM_000732 | CD3D | ctgagagggacattactgatgggagtgagg |
| 439 | NM_000773 | CYP2E1 | gttacaaactctgtgtcattccccgctcat |
| 440 | NM_000778 | CYP4A11 | aacctggttttttcccgtgtgaggaatgcc |
| 441 | NM_000791 | DHFR | acccatgaaggtaactaacggaaggaaaaa |
| 442 | NM_000801 | FKBP1A | agagcgagccgaacacaaaggagacgaaca |
| 443 | NM_000852 | GSTP1 | actcacacgtatggaatacccctgcacgcg |
| 444 | NM_000856 | GUCY1A3 | gagttttttgtacgattcctgcaacttttc |
| 445 | NM_000867 | HTR2B | tagttatgtatagcagaactggcagttgtc |
| 446 | NM_000878 | IL2RB | ttaatgatccgtgtgtaccatctttgtgat |
| 447 | NM_000885 | ITGA4 | cgagtggaccattatcactttaaagccctt |
| 448 | NM_000887 | ITGAX | cgatttcccaggctgaattgggagtgagat |
| 449 | NM_000905 | NPY | cgaaaacgcctgacacgaagagcgagacaa |
| 450 | NM_000906 | NPR1 | gaaaagagactaggtgaagagagggcaggg |
| 451 | NM_000953 | PTGDR | ggcatacaaggagtatgatttaacagtatg |
| 452 | NM_000960 | PTGIR | tgatgacgtaggacatgtgcttggtacaaa |
| 453 | NM_000964 | RARA | gctaatgaagattactgacctgcgaagcat |
| 454 | NM_000967 | RPL3 | ggtggtcttgatgccttaggcctctcttgt |
| 455 | NM_000968 | RPL4 | tcttgcgtggtgctcgaagggctctttgga |
| 456 | NM_000970 | RPL6 | aagagagtggtgccgtccgacaaaacacgg |
| 457 | NM_000972 | RPL7A | gccaaacagaattaacgcaactaataacct |
| 458 | NM_001001547 | CD36 | cctgcatataccaatagcattacctatgac |
| 459 | NM_001005 | RPS3 | aaggagagcaggtagagcgaagcagacgag |
| 460 | NM_001009 | RPS5 | catagagactaactagcggggagaggagca |
| 461 | NM_001015 | RPS11 | catatattcatgtgtcatcgttcaggaaca |
| 462 | NM_001019 | RPS15A | gcactatgttgaactattaaacttaccagc |
| 463 | NM_001069 | TUBB2 | gttcttggagtcgaacatctgctgggtgag |
| 464 | NM_001079 | ZAP70 | tcaggtggtcaggcgtagatcaccagaata |
| 465 | NM_001092 | ABR | attgatgtaaaccacgtgagaggaaaatgt |
| 466 | NM_001130 | AES | gctgtatcaagggtgggcttagctgtgcct |
| 467 | NM_001150 | ANPEP | tccctaaagaccctaaatctgaggaatcaa |
| 468 | NM_001165 | BIRC3 | cattgtactaataccgggaacatgaagcca |
| 469 | NM_001175 | ARHGDIB | cccaactgatatgttcatagaatgacagtt |
| 470 | NM_001178 | ARNTL | gcactccagctaacaaaagattgacaataa |
| 471 | NM_001207 | BTF3 | cattctttgcagctaattaagccgaagaag |
| 472 | NM_001211 | BUB1B | agatgcactaccattgctgttctacttttt |
| 473 | NM_001219 | CALU | aatgcgaacaggtacctatctgtttctaaa |
| 474 | NM_001226 | CASP6 | atcgttagggtgaagcattatggtctaatg |
| 475 | NM_001228 | CASP8 | gtgaactatgaagtaagcaacaaggatgac |
| 476 | NM_001229 | CASP9 | agcaaaccggggcctactagagtctgaaca |
| 477 | NM_001237 | CCNA2 | gttgtggccaagtacaaattatggtatcta |
| 478 | NM_001239 | CCNH | tctgcataatcaaaggggtagcacaaataa |
| 479 | NM_001255 | CDC20 | aagcgaagagcaacgcacgagagaaacgac |
| 480 | NM_001256 | CDC27 | ctccatacagtgtactcttattcttggcaa |
| 481 | NM_001265 | CDX2 | gtctgtgtaacatccaagccagagttttta |
| 482 | NM_001266 | CES1 | aagactggggtcttttgcgaaagggattgc |
| 483 | NM_001273 | CHD4 | ataccacctccaccgctgagcagtgacctt |
| 484 | NM_001274 | CHEK1 | gcaaactgcaaatagtagttcctgaagtgt |
| 485 | NM_001280 | CIRBP | cctgtgaaagtcggattcgaataaagggcc |
| 486 | NM_001295 | CCR1 | aacaatgatggacttcaattgtactcactg |
| 487 | NM_001312 | CRIP2 | tgtgctgtcaataaacggtttgaggattgc |
| 488 | NM_001313 | CRMP1 | tggcacttgtaactcaccgtgctgtcttct |
| 489 | NM_001337 | CX3CR1 | cttcaagatcatgtaccccaatttacttgc |
| 490 | NM_001344 | DAD1 | agatacgaacaacgcaaccgcacgcagcca |
| 491 | NM_001345 | DGKA | ccctggatgcagacgccctgtacaatcaag |
| 492 | NM_001398 | ECH1 | gggcgatgacagttgtttctatgccttctg |
| 493 | NM_001404 | EEF1G | ccaccaattcatgcgctatcaaatgtatta |
| 494 | NM_001428 | ENO1 | agagtcatgtgagcctcgtgtcatctccgg |
| 495 | NM_001436 | FBL | cagcatactaaccagacagcgacacgcaga |
| 496 | NM_001441 | FAAH | acataggccaaggcccaactaacagtcaag |
| 497 | NM_001456 | ELNA | agggagccatttggtggcgctgcttgtctt |
| 498 | NM_001459 | FLT3LG | aagccctggatcactcgccagaacttctcc |
| 499 | NM_001462 | FPRL1 | ctgaaaaggaattgagaagtaattcctctg |
| 500 | NM_001489 | NR6A1 | gacattaggtcagccactagatgtatttgt |
| 501 | NM_001513 | GSTZ1 | cccgcgctgaaatttggcgtgaattaaact |
| 502 | NM_001515 | GTF2H2 | gttatggatgtcagggggaattgaaagacc |
| 503 | NM_001540 | HSPB1 | cccttgccgttacttacgaaacacccaaaa |
| 504 | NM_001560 | IL13RA1 | ttttggtagtcttcaaccagggattgtttc |
| 505 | NM_001607 | ACAA1 | ccgctgccgtctttgaataccctgggaact |
| 506 | NM_001630 | ANXA8 | ccaaggacactgtgttataagaggcgtggg |
| 507 | NM_001640 | APEH | tctggctacgcacacacttgggcagctgaa |
| 508 | NM_001654 | ARAF | ccatgtggattttgggggtcccttttgtgt |
| 509 | NM_001664 | RHOA | ctcataccacttgtttctgccgtgctcatg |
| 510 | NM_001700 | AZU1 | gctgtaataaagaagccgatctctcctctg |
| 511 | NM_001712 | CEACAM1 | acacggactgtgcatactttccctcatcca |
| 512 | NM_001715 | BLK | tagtatttgggcatggcttacacctgtcat |
| 513 | NM_001716 | BLR1 | aagctgggtaatcgatgggggagtctgaag |
| 514 | NM_001728 | BSG | aatgctgtctggttgcgccatttttgtgct |
| 515 | NM_001734 | C1S | tggacaaatcgccagagatgtggtaagtga |
| 516 | NM_001743 | CALM2 | gttgttgttgaagtgtggagttgtaactct |
| 517 | NM_001747 | CAPG | aagacggcagaacgagtaagaacagacagg |
| 518 | NM_001752 | CAT | cccactttctatagcagattgtgtaacaat |
| 519 | NM_001753 | CAV1 | atgcatgtcctgtaaaggttacaagcctgc |
| 520 | NM_001759 | CCND2 | agctgccttttaagaggtcttatctgttca |
| 521 | NM_001767 | CD2 | agttacagggtgatgcttagagagggcttg |
| 522 | NM_001772 | CD33 | cactaaagatcacgtaccatatgattccat |
| 523 | NM_001774 | CD37 | ttcatgacgctctcgatattcctgtgcaga |
| 524 | NM_001776 | ENTPD1 | tctagaaaactccttaccatttgtcttagg |
| 525 | NM_001783 | CD79A | ctctttcctcgcgccgtgccgtttttacct |
| 526 | NM_001786 | CDC2 | cttatcttggctttcgagtctgagtttaaa |
| 527 | NM_001793 | CDH3 | agatgaagggtgaggacaatcgtgtatatg |
| 528 | NM_001794 | CDH4 | cataactgccaggttccgacttctgtccac |
| 529 | NM_001795 | CDH5 | ctgcaagggattgtagataacactgacttg |
| 530 | NM_001798 | CDK2 | ggtcatagtgggtggatttgttgccatgtg |
| 531 | NM_001830 | CLCN4 | tgttggtcttcaggaggggaagtttgctgt |
| 532 | NM_001838 | CCR7 | ttctgctttcgattcgttaagagagcaaca |
| 533 | NM_001839 | CNN3 | ccaatgtatcaatgtagagttgctctgttt |
| 534 | NM_001897 | CSPG4 | aataggataatatattcagggtgcagggtg |
| 535 | NM_001901 | CTGF | ccaaaagttacatgtttgcacctttctagt |
| 536 | NM_001905 | CTPS | cagactcgatgtgtactctaacttaagaaa |
| 537 | NM_001908 | CTSB | gccacaaattcataaccacttatccttcca |
| 538 | NM_001916 | CYC1 | acaacaagacaacgcacgaacaacgagcgg |
| 539 | NM_001923 | DDB1 | atgggtagcctgggtgtaaaacctggagat |
| 540 | NM_001928 | DF | ggagtcgatataaggcgtacggcagaatgc |
| 541 | NM_001939 | DRP2 | tgattcttctgaccctagaaatgttccctt |
| 542 | NM_001941 | DSC3 | ccaagactttactagtgccgataaactttc |
| 543 | NM_001952 | E2F6 | ctcattgggtaagtcatttaccactctgtg |
| 544 | NM_001964 | EGR1 | tattgcccatgggatatgtggtgtatatcc |
| 545 | NM_001993 | F3 | ggtacttaaagcttctatggttgacattgt |
| 546 | NM_001999 | FBN2 | accaaacctcatatgtgaaatggccaaagc |
| 547 | NM_002015 | FOXO1A | cagattccacgttcttgttccgatactctg |
| 548 | NM_002017 | FLI1 | tggaaatgcgtgtaacagtactgcaataat |
| 549 | NM_002023 | FMOD | catgagtggtggctaacctgaccaataaag |
| 550 | NM_002033 | FUT4 | ccttggtatttagtttggtgaatacttgca |
| 551 | NM_002046 | GAPD | cccacaaacacgaaacgggaatccattttt |
| 552 | NM_002049 | GATA1 | gaaggatggtattcagactcgaaaccgcaa |
| 553 | NM_002064 | GLRX | ccctacaccaagagtgtatctgtgaaagag |
| 554 | NM_002065 | GLUL | gtaaacaaactgtgtaactgcccaaagcag |
| 555 | NM_002067 | GNA11 | cctcttcacccatcaacgctgtgctttgcc |
| 556 | NM_002068 | GNA15 | accagaattctaggtgcgagtctcagctgt |
| 557 | NM_002076 | GNS | ccttcaaaaggaccctgttcactgctgcac |
| 558 | NM_002086 | GRB2 | atagcatttggtaggtagtgattaactgtg |
| 559 | NM_002090 | CXCL3 | cttacttctctcctgtcagttggtgctccc |
| 560 | NM_002094 | GSPT1 | agacagcaggttaatacctagatctcattt |
| 561 | NM_002102 | GYPE | ccatgcaaaactgtagatcaataaaacctc |
| 562 | NM_002107 | H3F3A | attttgggtagacgtaatcttcaccctttc |
| 563 | NM_002108 | HAL | ggaatctttggggattaaccaacctccttt |
| 564 | NM_002110 | HCK | aatccacaatctgacattctcaggaagccc |
| 565 | NM_002118 | HLA-DMB | gtgtgccatagaggacagcaactggtgatt |
| 566 | NM_002121 | HLA-DPB1 | caaatctgcctgataggacccatattccca |
| 567 | NM_002128 | HMGB1 | tgtgtacccgaggggtaatgattaaatgat |
| 568 | NM_002129 | HMGB2 | gcacagcaaacttgtaggaattagtatcaa |
| 569 | NM_002135 | NR4A1 | tttttaacacatagcgccgtgctgtaaata |
| 570 | NM_002141 | HOXA4 | gtgcatttagacttatgtggaactgtacaa |
| 571 | NM_002145 | HOXB2 | acacagaaaaattccgtttggtagactcct |
| 572 | NM_002162 | ICAM3 | tccagttctgtgcggcatgagaaaggggct |
| 573 | NM_002166 | ID2 | tgtgtttattgaatggtgattgcctgcttt |
| 574 | NM_002167 | ID3 | aggcacaagaacacgagacaacgcagacac |
| 575 | NM_002186 | LL9R | cacataagtgcatcttgcggggcagtgagt |
| 576 | NM_002193 | INHBB | gaaactggactcgtacgactctttttatat |
| 577 | NM_002198 | IRF1 | tacactaacatttcccccgagctcttggcc |
| 578 | NM_002199 | IRF2 | tatgcttgaatgccacgcggtacaaaggaa |
| 579 | NM_002222 | ITPR1 | gcctagttttgtacatggatctcattttac |
| 580 | NM_002224 | ITPR3 | tgagctgcgcttgcgtggctgtttcatgac |
| 581 | NM_002228 | JUN | gcttaccaaaggatagtgcgatgtttcagg |
| 582 | NM_002229 | JUNB | gaaacacgcacttagtctctaaagagttta |
| 583 | NM_002230 | JUP | tgcagggtcgttgtcaggttatgtgagaaa |
| 584 | NM_002248 | KCNN1 | accaaccgcgttgatggacacccactgtgt |
| 585 | NM_002276 | KRT19 | aacggagagaaggacacgacgacagagcag |
| 586 | NM_002295 | LAMR1 | acataagatgcctccgtgagaggctggtgg |
| 587 | NM_002312 | LIG4 | gatccatgcgatactatgtgtgcattattt |
| 588 | NM_002341 | LTB | agtcaagggagtagccggggtagtggctta |
| 589 | NM_002349 | LY75 | gaaaagcacggctgtatataatggtgatgt |
| 590 | NM_002351 | SH2D1A | agcatttaatatggatgccgtgggagtaca |
| 591 | NM_002353 | TACSTD2 | ggcgttgtggctctaagattaaacgacttt |
| 592 | NM_002356 | MARCKS | cctgcttaaggtgttctaattttctgtgag |
| 593 | NM_002379 | MATN1 | tcactcatcgcagttctccccacggctact |
| 594 | NM_002388 | MCM3 | tctttgcagtagcaccagttaaggtgaata |
| 595 | NM_002390 | ADAM11 | gatcgtctccaattcgaaaacaaccgtcct |
| 596 | NM_002392 | MDM2 | cctactttggtagtggaatagtgaatactt |
| 597 | NM_002393 | MDM4 | ccactaacttctgtaatgtaagattgagtc |
| 598 | NM_002398 | MEIS1 | gcgcatggctgaaatcctaggcgagaagaa |
| 599 | NM_002412 | MGMT | ccgctgtattaaaggaagtggcagtgtcct |
| 600 | NM_002414 | CD99 | ccctgccgccctaacaataggagatagaag |
| 601 | NM_002415 | MIF | tcaccccctttggttcattctcccgaatgt |
| 602 | NM_002417 | MKI67 | ctggttactgtatcccagtgaccagccaca |
| 603 | NM_002419 | MAP3K11 | ttgaccggaggagaaacgtcttcgaggtcg |
| 604 | NM_002421 | MMP1 | ggcaagggataactcttctaacacaaaata |
| 605 | NM_002422 | MMP3 | agagaaggggaagcactcgtgtgcaacaga |
| 606 | NM_002436 | MPP1 | tctataatgccaaaatgacacatctgtgca |
| 607 | NM_002441 | MSH5 | tgtcctcattctcccctatatgacatgcaa |
| 608 | NM_002444 | MSN | atgtcctatattggctaaattgaaacctgg |
| 609 | NM_002447 | MST1R | cccttgaaccaataaaggaacaaatgacta |
| 610 | NM_002460 | IRF4 | gtaagttatgttttacatgccccgtttttg |
| 611 | NM_002462 | MX1 | ttcagccctcagaatcgctccaccttgcag |
| 612 | NM_002466 | MYBL2 | gctcctggtgctaacaacaaagttccactt |
| 613 | NM_002475 | MLC1SA | tgcactatcccacacacgtactcaccacgc |
| 614 | NM_002483 | CEACAM6 | tttccttgttccaatttgacaaaacccact |
| 615 | NM_002512 | NME2 | acagcgcacgacagcacgaagcggaaaaac |
| 616 | NM_002514 | NOV | ttaatgccaccacacgtgttccgcttctct |
| 617 | NM_002527 | NTF3 | aaaacttgttttgtgatccggctctcagga |
| 618 | NM_002530 | NTRK3 | gttgaacatcaaggagatctacaaaatcct |
| 619 | NM_002572 | PAFAH1B2 | atgcccggctcttaggaattttgtctgttt |
| 620 | NM_002576 | PAK1 | tcatgctctgaggtactactgcctctgcag |
| 621 | NM_002585 | PBX1 | tcagcctggttttcgtcatcttccctgccc |
| 622 | NM_002592 | PCNA | aagtgaacacacacgaccaacagcagcgcg |
| 623 | NM_002600 | PDE4B | tcttctgataacacttgttaggcctcttac |
| 624 | NM_002608 | PDGFB | cacgtgaacttgtgcgtgtctctggcagtg |
| 625 | NM_002609 | PDGFRB | ggactcacgttaactcacatttatacagca |
| 626 | NM_002616 | PER1 | gctgtaccctctgccgatggcatttgtgtt |
| 627 | NM_002619 | PF4 | cattcttcagcgtggctatcagttgggcag |
| 628 | NM_002621 | PFC | tcaaccccgtgaggtgagtattaatattac |
| 629 | NM_002648 | PIM1 | ggcattgctgactgtgtatataggataatt |
| 630 | NM_002658 | PLAU | ccttttagcctagttcatccaatcctcact |
| 631 | NM_002659 | PLAUR | cactctcctctggacctaaacctgaaatcc |
| 632 | NM_002687 | PNN | tatctgttggccattactatacatgtgcaa |
| 633 | NM_002704 | PPBP | gaacccattgcaaccaagtcgaagtgatag |
| 634 | NM_002729 | HHEX | aataaagccgtccgtgggacgactgacctc |
| 635 | NM_002730 | PRKACA | tgcgaaggacgagacttcctcttgaacagt |
| 636 | NM_002744 | PRKCZ | gttcatctttcgtcctgtgtctgactttct |
| 637 | NM_002753 | MAPK10 | tatatggggggagtgagctctctcagaccc |
| 638 | NM_002758 | MAP2K6 | atagatcccctgagaggtatctgagaagaa |
| 639 | NM_002791 | PSMA6 | aagacgagacgcaaacgagccaagcagagg |
| 640 | NM_002800 | PSMB9 | tagcatataagccaggcatgtctcccgagg |
| 641 | NM_002814 | PSMD10 | cacattttaagttggatggtgtgctctaaa |
| 642 | NM_002827 | PTPN1 | atgtgacaacaattgctaaagcaaaccttg |
| 643 | NM_002831 | PTPN6 | tctccctgaccctgtatatagcccagccag |
| 644 | NM_002835 | PTPN12 | cagtaagtgccttggaacaatattgaattc |
| 645 | NM_002844 | PTPRK | tttctagattgccagctcatgacatggtgc |
| 646 | NM_002856 | PVRL2 | actggacttctcccgtctctagggctgcat |
| 647 | NM_002868 | RAB5B | acagaatgcgactgctgatttaccgatgta |
| 648 | NM_002870 | RAB13 | aggctagctcggcactacactagggaattt |
| 649 | NM_002880 | RAF1 | tttcttaggggacacgtcctcctttcacag |
| 650 | NM_002887 | RARS | tgtccaaaggatgtaatccttcataggttt |
| 651 | NM_002893 | RBBP7 | acaagtagcagggtattgcctttgattcaa |
| 652 | NM_002901 | RCN1 | gcttataccatggaatgaggacaaggtgat |
| 653 | NM_002908 | REL | gcaattgagtgactcctttccatatgaatt |
| 654 | NM_002913 | RFC1 | aggaactggtagtcttgtttgggtgatgag |
| 655 | NM_002934 | RNASE2 | tgacctgtcctagtaacaaaactcgcaaaa |
| 656 | NM_002935 | RNASE3 | acgggattctccacggtatcctgtggttcc |
| 657 | NM_002936 | RNASEHI | cattagttgtctgtcaaggaaggtgagtgg |
| 658 | NM_002953 | RPS6KA1 | cagctccttttccgttctgttctgctggga |
| 659 | NM_002960 | S100A3 | gcgcagaagtgtgaccgactgaatcataaa |
| 660 | NM_002961 | S100A4 | ctcgcgttctgatgacacgtctactaaaac |
| 661 | NM_002971 | SATB1 | agaaatgttctgactaggagtggttattga |
| 662 | NM_002972 | SBF1 | cagagtctatataaagagagaactaacgcc |
| 663 | NM_002975 | CLEC11A | atgttggcgtacacgttgcaggctgcgtga |
| 664 | NM_002983 | CCL3 | cctcttctatggactggttgttgccaaaca |
| 665 | NM_002984 | CCL4 | gttatgacgaaccatccgcccgccaagctt |
| 666 | NM_002985 | CCL5 | attaccactcaaacgcgaaacacaatcaaa |
| 667 | NM_003002 | SDHD | aacgatagagacagaacgcatgcgcgcagg |
| 668 | NM_003005 | SELP | tcaagctagaaggccacatgtcaccgtgga |
| 669 | NM_003006 | SELPLG | gtactgaagagtgacggacttctgaggctg |
| 670 | NM_003009 | SEPW1 | agcgagacaaacgcgagcataggacaccca |
| 671 | NM_003025 | SH3GL1 | acgtctccagcacacctgaagaactggagg |
| 672 | NM_003038 | SLC1A4 | gctgttctctttctaacatgttgtggtaaa |
| 673 | NM_003039 | SLC2A5 | tattaccggcctcgtcggtgtggtctgtct |
| 674 | NM_003058 | SLC22A2 | tcatgaggtccttccatatttagattgggt |
| 675 | NM_003072 | SMARCA4 | gtgcgtcaccgtccactcctcctactgtat |
| 676 | NM_003073 | SMARCB1 | ttgtcaccaccatcgcatacagcatccggg |
| 677 | NM_003100 | SNX2 | aagtggactgtggcatgacattctgcaata |
| 678 | NM_003113 | SP100 | catagtgctaaaagcagaactgccattcca |
| 679 | NM_003118 | SPARC | ccaaaatcaagagtgagatgtagaaagttg |
| 680 | NM_003120 | SPI1 | gaaggggcggttctcctcgaccttagatga |
| 681 | NM_003121 | SPIB | gttcaaagagagaattatatgctggcgcgg |
| 682 | NM_003123 | SPN | cttcttgacgcttttcataatgtgcaaagt |
| 683 | NM_003127 | SPTAN1 | tgccctcattccgacttcagaaaatcgaag |
| 684 | NM_003128 | SPTBN1 | tctctgtgcctaatgttcctcaatgtggtt |
| 685 | NM_003133 | SRP9 | gcatggtaagttcccttagctatatgaatt |
| 686 | NM_003159 | CDKL5 | gacataccatgagaatgcggcactgacggg |
| 687 | NM_003189 | TAL1 | gtgaggatgtatcgggaagatttctaaata |
| 688 | NM_003200 | TCF3 | gacctgtcctgtatataacagcactgtagc |
| 689 | NM_003222 | TFAP2C | cccaaataattgttgtgtgtatgatacgtg |
| 690 | NM_003225 | TFF1 | cgccactacgcctctactacacgaacacaa |
| 691 | NM_003234 | TFRC | gaatgaaatatcagactagtgacaagctcc |
| 692 | NM_003262 | TLOC1 | tcaaaggccaatgatacttcgcataattca |
| 693 | NM_003288 | TPD52L2 | cccatgcccactctttaggcacaaatgcag |
| 694 | NM_003302 | TRIP6 | tcctttgattgatcactctccctgacatcc |
| 695 | NM_003311 | PHLDA2 | aaatgaaattgcggccattgatctctaacc |
| 696 | NM_003315 | DNAJC7 | aaagggaaccaatgccgaagaccgagggca |
| 697 | NM_003318 | TTK | attttactcttggaatagtgggtggatagc |
| 698 | NM_003352 | SUMO1 | gagaggaaacgagtagggacaaacacgagg |
| 699 | NM_003361 | UMOD | aatgggacttgtgacggtgtacctgaggcc |
| 700 | NM_003383 | VLDLR | aggacaaaacgggttactaagatgaaattg |
| 701 | NM_003390 | WEE1 | ttcttggttgagattggttggttgagactc |
| 702 | NM_003395 | WNT9A | tccgagtctccgtgcgtgcaatgatttctc |
| 703 | NM_003403 | YY1 | gtgctcagttgtagaatgtattgtaccttt |
| 704 | NM_003415 | ZNF268 | tgtatcggaagcatataccttggagggacc |
| 705 | NM_003425 | ZNF45 | tcagtttctggctagcaactagaagttttg |
| 706 | NM_003427 | ZNF76 | ggtggcacatggatgaatgagtatttaata |
| 707 | NM_003453 | ZNF198 | ccttacaaggttatgtagagagataccatc |
| 708 | NM_003467 | CXCR4 | cctacagtgtacagtcttgtattaagttgt |
| 709 | NM_003480 | MFAP5 | tgaccctcctactccacattgcaacatttc |
| 710 | NM_003549 | HYAL3 | atagactgccccgacagtctacaagcctca |
| 711 | NM_003582 | DYRK3 | gtggacagagatatgcccagagatgcatat |
| 712 | NM_003627 | SLC43A1 | tacccctgaggtcccatgtgccatgagtgt |
| 713 | NM_003636 | KCNAB2 | agactcagaccgcgacacagccaccgtatt |
| 714 | NM_003645 | SLC27A2 | gaaatttgcatacccgtaaagggagacttt |
| 715 | NM_003692 | TMEFF1 | cagattggaataaagcctattctaccagtt |
| 716 | NM_003701 | TNFSF11 | caccaggtgcctttcaaatttagaaactaa |
| 717 | NM_003707 | RUVBL1 | tgaaagaacccttccttacctggtgtgttt |
| 718 | NM_003739 | AKR1C3 | acttctcccgccgtattggttgcggacctt |
| 719 | NM_003746 | DNCL1 | aaggagcgaccgaagacaagcgaacgagac |
| 720 | NM_003753 | EIF3S7 | cttagtggaatgtgtgtctaacttgctctc |
| 721 | NM_003801 | GPAA1 | atgttccgcaagctcaaccacctcctggag |
| 722 | NM_003805 | CRADD | tcctcccctgtaatacttagcaggccagtt |
| 723 | NM_003821 | RIPK2 | gtccccatttttaacctcagccttccctac |
| 724 | NM_003824 | FADD | aggcagcgggatctcgtatctttaaaaagc |
| 725 | NM_003842 | TNFRSF10B | ctgccctgtcaaaggtccctatttgaaatg |
| 726 | NM_003852 | TIF1 | gtaggttagatgctattaagaaggcactta |
| 727 | NM_003874 | CD84 | ttggtccttctatcactaaaactcatctca |
| 728 | NM_003877 | SOCS2 | tttctgaatgaccggaagttcttctgatct |
| 729 | NM_003879 | CFLAR | acatggtaaacgctgtccctagtaaaaatg |
| 730 | NM_003884 | PCAF | gctttgtaccggatctgctgaagcatctgt |
| 731 | NM_003900 | SQSTM1 | tggatgggactccatagctccttcccagga |
| 732 | NM_003902 | FUBP1 | agggccaataataagaagtggacaatacag |
| 733 | NM_003914 | CCNA1 | atggaagcacttccagaacttcacctccat |
| 734 | NM_003954 | MAP3K14 | agactccgtgggagaagctcattcccacat |
| 735 | NM_003955 | SOCS3 | gtattctgtgtcaggtattgggctggacag |
| 736 | NM_003974 | DOK2 | cctgcacctttcagatttcttggtggcatt |
| 737 | NM_003998 | NFKB1 | attaaaggtatcacggtcgccacctggcat |
| 738 | NM_004039 | ANXA2 | acacagacggaagggacaaggagcggaaca |
| 739 | NM_004047 | ATP6V0B | ttgctgcgtgttgatttggaggcactgcag |
| 740 | NM_004064 | CDKN1B | cttaaaaggttgcatactgagccaagtata |
| 741 | NM_004067 | CHN2 | tattttacgtggagcatcattgtgtgactg |
| 742 | NM_004077 | CS | taaacccctgggtaactgtcaagtcatgat |
| 743 | NM_004083 | DDIT3 | acatacgcagggggaaggcttggagtagac |
| 744 | NM_004088 | DNTT | gttgtcactggtggctcattcagggaagct |
| 745 | NM_004093 | EFNB2 | ttgctgcatatttgtgccgtaattatgtac |
| 746 | NM_004099 | STOM | cttgggagggacgcatagaaggagctctag |
| 747 | NM_004104 | FASN | taactgtcagtgtacacgtctggaccccgt |
| 748 | NM_004111 | FEN1 | gaaactcgaacttgctatgtaatttgtgtc |
| 749 | NM_004119 | FLT3 | tggagcattgatctgcatccaaggccttct |
| 750 | NM_004177 | STX3A | cttacagtttggaatacaacatgtgaaggt |
| 751 | NM_004208 | PDCD8 | gagtgtgaatgatcaagtcctttgtgaata |
| 752 | NM_004221 | NK4 | aaggacagaaccacgacacgacacagagaa |
| 753 | NM_004235 | KLF4 | tttttatgcagacagtctgttatgcactgt |
| 754 | NM_004310 | RHOH | gaaatctagccagtgtgtagacaatgttga |
| 755 | NM_004313 | ARRB2 | taaaacagagatattaggagctccatcact |
| 756 | NM_004320 | ATP2A1 | tccccaccccgatagtgacacatcttcagg |
| 757 | NM_004324 | BAX | acgcaaggactagcggagacaagacagagg |
| 758 | NM_004335 | BST2 | tgtttgtaaaaagggccagacaaaggggca |
| 759 | NM_004336 | BUB1 | gctcttagaatgtaagcgttcacgaaaata |
| 760 | NM_004343 | CALR | ctggttcggatttggggtggattttggttt |
| 761 | NM_004355 | CD74 | acagggagaagggataaccctacacccaga |
| 762 | NM_004374 | COX6C | ggctattcagagtggtcagggagcttagag |
| 763 | NM_004380 | CREBBP | ctttaagatcccctgtaagaatgtttaagg |
| 764 | NM_004385 | CSPG2 | aaggactccaatgtcgaactcttctttgct |
| 765 | NM_004413 | DPEP1 | caagtatccagacctgatcgctgagctgct |
| 766 | NM_004425 | ECM1 | ctgaacactcattacactaaacacctcttg |
| 767 | NM_004430 | EGR3 | gacaatcagccggcctataaatctccttat |
| 768 | NM_004448 | ERBB2 | ttcttgtatcccttttacagtcaaagtcca |
| 769 | NM_004449 | ERG | tcatggatagctgcaatttctcactttaca |
| 770 | NM_004454 | ETV5 | catcctgccaagctgcgttatattctgtac |
| 771 | NM_004475 | FLOT2 | gttggggacagaaaagtgtgtagaccttct |
| 772 | NM_004494 | HDGF | gtcaccagatctgatttgtaacccactgag |
| 773 | NM_004501 | HNRPU | gtttctgacaataactgggaaggttttttc |
| 774 | NM_004508 | IDI1 | tcaacccccaactgaggaccactgtcctac |
| 775 | NM_004513 | IL16 | catgaaactccaccttgcggggataaagag |
| 776 | NM_004526 | MCM2 | cactctcttatttgtgcattcggtttggtt |
| 777 | NM_004530 | MMP2 | agcatgtccctaccgagtctcttctccact |
| 778 | NM_004557 | NOTCH4 | ctgctatcgctatttaagaaccctaaatct |
| 779 | NM_004583 | RAB5C | tgtgcctgtctacctgcgcgtttgctgtac |
| 780 | NM_004615 | TM4SF2 | cccacagtatattggttattggtcctgaag |
| 781 | NM_004624 | VIPR1 | tgcaacaggcttgtgcaacaataaatgttg |
| 782 | NM_004633 | IL1R2 | gaaaagcagatggtctgactgtgctatggc |
| 783 | NM_004642 | CDK2AP1 | gatctcagttctgcgtttattgtaagttga |
| 784 | NM_004688 | NMI | acaacaattgagacacaagcggtccctctc |
| 785 | NM_004689 | MTA1 | ggcttgcttctatgggctttgcaccaccct |
| 786 | NM_004706 | ARHGEF1 | catcactgagactgccggatccctgaaagt |
| 787 | NM_004725 | BUB3 | ccctagtaagcccagttgctgtatctgaac |
| 788 | NM_004815 | PARG1 | tagttctatgtgatgtaaaggtctagggag |
| 789 | NM_004827 | ABCG2 | gaataggtaggttagtagcccttcagtctt |
| 790 | NM_004867 | ITM2A | gagtttaggttgtatgaattctacaaccct |
| 791 | NM_004924 | ACTN4 | atgaagacatagccgattctctgcccgggc |
| 792 | NM_004936 | CDKN2B | cctgttaagttcgtatctaaacctaagaca |
| 793 | NM_004938 | DAPK1 | ggtttcataacttcctgtacttgaagtcta |
| 794 | NM_004941 | DHX8 | accagcaggtggtctatatccatccttcca |
| 795 | NM_004972 | JAK2 | gctcattaagaagtgcagcaggttaagaat |
| 796 | NM_004994 | MMP9 | ctacgtgacctatgacatcctgcagtgccc |
| 797 | NM_004997 | MYBPH | accaggcctacagtcaaactccagagatgc |
| 798 | NM_005012 | ROR1 | catggtggagcgtgacgattgtcccagcta |
| 799 | NM_005080 | XBP1 | ctagtgtagcttctgaaaggtgctttctcc |
| 800 | NM_005084 | PLA2G7 | catgttacagaactcttcaggaatagagaa |
| 801 | NM_005085 | NUP214 | tccctcccactattaaacagtctgtttccg |
| 802 | NM_005098 | MSC | aagtgatcctgcgatagggaacgcgccctt |
| 803 | NM_005104 | BRD2 | ctccccatttggtcccctggactgtctttg |
| 804 | NM_005123 | NR1H4 | cacaactgtaaatattgggctagatagaac |
| 805 | NM_005157 | ABL1 | ttctaagtggcgtgtgcatagcgtcctgcc |
| 806 | NM_005161 | AGTRL1 | ctcaaagcatccagtgaacactggaagagg |
| 807 | NM_005178 | BCL3 | gtaacgggcacggatcacgatgtaaattat |
| 808 | NM_005187 | CBFA2T3 | catgatggtaataaacgagatgtttgccaa |
| 809 | MM_005192 | CDKN3 | aacttctctccgccccggttttctttcccc |
| 810 | NM_005197 | CHES1 | ttcagcaaacaagtgctagcttcactgacc |
| 811 | NM_005215 | DCC | gcataccaattacccataaacagcacacct |
| 812 | NM_005225 | E2F1 | aggcctgggtgatttatttattgggaaagt |
| 813 | NM_005230 | ELK3 | gggcaatatgaaagcatatatcacgttttg |
| 814 | NM_005239 | ETS2 | ggggttcagcctaacagttatggaaactac |
| 815 | NM_005245 | FAT | ttattggaaagtgtaacggggaccttctgc |
| 816 | NM_005246 | FER | gtcctccagcagagtaacattattgttctc |
| 817 | NM_005248 | FGR | acaccacctagggcaacctacttgttttac |
| 818 | NM_005252 | FOS | attgttgaggtggtctgaatgttctgacat |
| 819 | NM_005263 | GFI1 | ttgaccctccatgtgtaccatagagggggg |
| 820 | NM_005317 | GZMM | acagggagggaccaataaatcataatgaag |
| 821 | NM_005318 | H1F0 | gggctagtacttagtttcacacccgggagc |
| 822 | NM_005334 | HCFC1 | taccatagtgcgatgtcgttttgtgctatt |
| 823 | NM_005335 | HCLS1 | acccgggaaagtacgtctagattgtgtggt |
| 824 | NM_005339 | HIP2 | gaaggttggggtatttgtcttgagaattaa |
| 825 | NM_005340 | HINT1 | aggcaatgattaagttaggcaatttccagt |
| 826 | NM_005356 | LCK | caggactttatctaatacctctgtgtgctc |
| 827 | NM_005375 | MYB | atgacggtgtacttactgccttgtagcaaa |
| 828 | NM_005385 | NKTR | cctctgctgcagcgttcaacttgtgtgttt |
| 829 | NM_005424 | TIE1 | aacatgccctgttcagctactcccactccc |
| 830 | NM_005427 | TP73 | tttttaacaggattggggtgtccaaactgc |
| 831 | NM_005439 | MLF2 | gatcccatcgtgaccgacggtgtttgtgta |
| 832 | NM_005494 | DNAJB6 | aaaactgttggtgaggtagtgtttcagtta |
| 833 | NM_005504 | BCAT1 | gatcatccgcaggctatgttaaaaggattt |
| 834 | NM_005521 | TLX1 | atgggcatctatgggagagtgtcaaccaga |
| 835 | NM_005529 | HSPG2 | gtcctagaagggaccctcctgtggtctttg |
| 836 | NM_005533 | IFI35 | ccgaatcttctgtgttcgttcttctttgct |
| 837 | NM_005556 | KRT7 | gatgaattccactggtggcagtagcagtgg |
| 838 | NM_005563 | STMN1 | ttatttaaagggaccttattttctgcccct |
| 839 | NM_005566 | LDHA | ttttggactcctatcccgttatgtctgggc |
| 840 | NM_005572 | LMNA | agcctgcgtacggctctcatcaactccact |
| 841 | NM_005583 | LYL1 | ttaacccctttggtactctcctgcatctcc |
| 842 | NM_005589 | ALDH6A1 | gcttatctgaaagtagtgcttaaacctgat |
| 843 | NM_005608 | PTPRCAP | tcacgcgtacctctacttatcaactaacgt |
| 844 | NM_005621 | S100A12 | ggagtaagagttaataaacacactcacgaa |
| 845 | NM_005651 | TDO2 | gtgacaagactaagcattaagatgagaaag |
| 846 | NM_005654 | NR2F1 | aggatcagatctgtgagcacgttggcgagg |
| 847 | NM_005671 | D8S2298E | actttcgaatcacaccataccttgattgag |
| 848 | NM_005687 | FARSLB | aagctgggtctcatgtttgagacaagttcc |
| 849 | NM_005730 | CTDSP2 | tcccccttcaagatgccatttggagggtag |
| 850 | NM_005731 | ARPC2 | tcctcgcgcccgtgcaggtgacaaataaca |
| 851 | NM_005738 | ARL4A | ccctttgtagcctaagtacgtaaacaaatt |
| 852 | NM_005761 | PLXNC1 | gtttgcacataggttccactttgggcactg |
| 853 | NM_005767 | P2RY5 | tcactgggacagaactttcaagttccttca |
| 854 | NM_005781 | TNK2 | agcggagaaagggtgccagaccattctctg |
| 855 | NM_005794 | DHRS2 | ggctgatccaattaacatgtggggttcttg |
| 856 | NM_005808 | CTDSPL | caatcaaaaggtttgcaatgatttccttcc |
| 857 | NM_005809 | PRDX2 | atatatatcgcgacatcaccggcccgaatc |
| 858 | NM_005826 | HNRPR | cccaatgctttctgatagtaggagataatt |
| 859 | NM_005835 | SLC17A2 | cagcaccgatcagaactgtaaagctataat |
| 860 | NM_005845 | ABCC4 | gacagtcatataaacgtcctgtttctgttt |
| 861 | NM_005870 | SAP18 | ggatgtgctattgtatgattacgaatagtc |
| 862 | NM_005895 | GOLGA3 | aatgttgtacgtgaagattctaggagggga |
| 863 | NM_005900 | SMAD1 | gctctcgtacattgagtacttttattccaa |
| 864 | NM_005902 | SMAD3 | gtctaccagttgacccgaatgtgcaccatc |
| 865 | NM_005907 | MAN1A1 | caaccccatggattaggctgaaacatatga |
| 866 | NM_005911 | MAT2A | cttaattgccacctctaacagcaccaaatc |
| 867 | NM_005923 | MAP3K5 | gcttgttctaaagctatccattgtgtcata |
| 868 | NM_005933 | MLL | ggccctaggggttccactagtgtctgcttt |
| 869 | NM_005936 | MLLT4 | cccatacacaagtggatttggccatctttg |
| 870 | NM_005944 | CD200 | tgttctaaagatattgttccagctagtgga |
| 871 | NM_005954 | MT3 | tgacgcgtttccgcgtattgtcccctataa |
| 872 | NM_005956 | MTHFD1 | ctgggagttaggaagtataagtaagccaag |
| 873 | NM_005957 | MTHFR | gcaactagccaaggctagttcctttcaatt |
| 874 | NM_005965 | MYLK | aaaggataccacagtgcatgctgtttgttc |
| 875 | NM_006005 | WFS1 | ggtgaatgtgtgaaggtcttgcctgaatcc |
| 876 | NM_006017 | PROM1 | actggtcggacaaaatttaacgttgatgta |
| 877 | NM_006038 | SPATA2 | gtcacagactggaatacgaaatactacagc |
| 878 | NM_006060 | ZNFN1A1 | ggcatttggaaacgggaataaacaaaattg |
| 879 | NM_006079 | CITED2 | ggccaaactgttctggatcaggaaagtcat |
| 880 | NM_006082 | K-ALPHA-1 | gaaggagaggaatactaattatccattcct |
| 881 | NM_006084 | ISGF3G | tcatctgtaagggactaggaaattccaaat |
| 882 | NM_006098 | GNB2L1 | tcggcacacgctagaagtttatggcagagc |
| 883 | NM_006101 | KNTC2 | ggagcagattgctaaagttgatagagaata |
| 884 | NM_006113 | VAV3 | ctgcagatttgtgtagagttctaataccaa |
| 885 | NM_006120 | HLA-DMA | gtgtcccttccccttatgattttactttcc |
| 886 | NM_006142 | SFN | cagtgcaagaccgagattgagggaaagcat |
| 887 | NM_006152 | LRMP | ttatctccccaactaaaatacaatggggaa |
| 888 | NM_006184 | NUCB1 | ttccatgttccggttccatccaaatacact |
| 889 | NM_006185 | NUMA1 | ttaagggccggggatggatcttttctaaat |
| 890 | NM_006187 | OAS3 | cagcatattcataactagagccatatcaca |
| 891 | NM_006190 | ORC2L | cagcttacagtcatcacataccccctgaaa |
| 892 | NM_006191 | PA2G4 | aggtttgtgccccactacagaacagggcta |
| 893 | NM_006196 | PCBP1 | atgatccaactgtgtaatttctggtcagtg |
| 894 | NM_006209 | ENPP2 | acatttagtcctgtactgtatggaaacact |
| 895 | NM_006216 | SERPINE2 | ctcctgtcttgctagacaaggttgctgttg |
| 896 | NM_006230 | POLD2 | tattagtttcctgtaggcgctgtaacaaag |
| 897 | NM_006231 | POLE | agcactacggcatgtcgtacctcctggaga |
| 898 | NM_006235 | POU2AF1 | agaatccatgtagaagtcatggacttttct |
| 899 | NM_006255 | PRKCH | ctcatgtcagtgaccagatttgtggcttat |
| 900 | NM_006263 | PSME1 | gacgctcccttgtcgttcagtatgtcggag |
| 901 | NM_006268 | DPF2 | cctaactcactgtcgctttggagttgaggt |
| 902 | NM_006273 | CCL7 | gtagttgaagtattaatcccaactggctga |
| 903 | NM_006286 | TFDP2 | attcctatgaccaaattgcttgcctacagt |
| 904 | NM_006299 | ZNF193 | tattacccctatatgcatcaaagctgcaac |
| 905 | NM_006301 | MAP3K12 | tactgtaacccctgtgaaaaaccttgaaat |
| 906 | NM_006302 | GCS1 | ttggataccagtaattcaaaccttcctcat |
| 907 | NM_006325 | RAN | tattgcgaattgcgtcgaacctcccctccc |
| 908 | NM_006329 | FBLN5 | ttttacccaattggattggaatgcagaggt |
| 909 | NM_006343 | MERTK | ttttgtttgctgacgactcctcagaaggct |
| 910 | NM_006354 | TADA3L | caggcatctgtgactgaccgattgatttga |
| 911 | NM_006355 | TRIM38 | tccagtctgctaggaccaattaccttgaaa |
| 912 | NM_006362 | NXF1 | tgtacttaaccccaggacctccttactttt |
| 913 | NM_006427 | SIVA | taggactttgacgtttgaatggtggggggt |
| 914 | NM_006472 | TXNIP | ttggtcagtcactctcagccatagcacttt |
| 915 | NM_006495 | EVI2B | gatcaagatcttaatgaatccctgccacct |
| 916 | NM_006509 | RELB | gtggggggtaggttggttgttcagagtctt |
| 917 | NM_006522 | WNT6 | atccgcgcgttggtgcaactgcacaacaac |
| 918 | NM_006534 | NCOA3 | aaccacatgaaatgacttatgggggatggt |
| 919 | NM_006559 | KHDRBS1 | ctacatgtgtaagtctgcctaaataggtag |
| 920 | NM_006565 | CTCF | ttaggacgccaacatgagacctgtaataaa |
| 921 | NM_006579 | EBP | gggttgctctagtcagggatgttacagttg |
| 922 | NM_006591 | POLD3 | aattatgctggggtctcgactaaaactgaa |
| 923 | NM_006602 | TCFL5 | gaatgtattctgatcggatcgtttatggtt |
| 924 | NM_006676 | USP20 | atgtctgtgctgtctagtttgtgttcaaaa |
| 925 | NM_006739 | MCM5 | gtgcttttggcatccgttaataataaagcc |
| 926 | NM_006747 | SIPA1 | tggagaccctaagggaactccaaaatctga |
| 927 | NM_006748 | SLA | ggatgctgggattcttgcctgtatgaatgc |
| 928 | NM_006759 | UGP2 | gattgtgtgaactattcatctggctcttgg |
| 929 | NM_006762 | LAPTM5 | ttcagtcaaagcaggcaacccccttgtggg |
| 930 | NM_006769 | LMO4 | cagagacatttgctctagtatggtgtattt |
| 931 | NM_006803 | AP3M2 | aataactgtcctgtcacatgtgcagcaggc |
| 932 | NM_006820 | IFI44L | gaagcggtgggctaagataggtcctactgc |
| 933 | NM_006825 | CKAP4 | ctctgagctgtattgttctttaatggctgt |
| 934 | NM_006845 | KIF2C | ctaaaccttctacgcctttgggccgagcac |
| 935 | NM_006857 | RY1 | cctcccatgacttgccattataattaaaac |
| 936 | NM_006875 | PIM2 | accggacaccaccagacactaggatgggat |
| 937 | NM_006904 | PRKDC | tgttagggatagtactaagcatttcagttc |
| 938 | NM_006910 | RBBP6 | ctgaattcattacaaccctgttatgtcact |
| 939 | NM_006931 | SLC2A3 | gcagtaaggcagggtcccatttctcactga |
| 940 | NM_006932 | SMTN | cccatgatcatcatgtcgtccacctccacc |
| 941 | NM_006937 | SUMO2 | gcacttatcataagtaaatactccctaacc |
| 942 | NM_006938 | SNRPD1 | cagtgcctcctttattaaggggttctttga |
| 943 | NM_006963 | ZNF22 | tgccaagtgtcagactctaatgagccctca |
| 944 | NM_006981 | NR4A3 | tgccttctgtgggcggaaatcaggaagcca |
| 945 | NM_006994 | BTN3A3 | gagttgacatccctattgactctttcccag |
| 946 | NM_007022 | CYB561D2 | tacctataccgcaagaggatccaaccatga |
| 947 | NM_007063 | TBC1D8 | cactgtttcaatgctggtaattgaaaccat |
| 948 | NM_007065 | CDC37 | ctatttggcaaacagcaatgatcttccaat |
| 949 | NM_007079 | PTP4A3 | caggtgctccggacacccgaaggcaataaa |
| 950 | NM_007111 | TFDP1 | gaatgcaactttctaaacagccccaagcaa |
| 951 | NM_007117 | TRH | atcacagtagcgctcatggctcgtaggttt |
| 952 | NM_012092 | ICOS | tagtttacaagtgagacccgatatgtcatt |
| 953 | NM_012120 | CD2AP | tttttgtttgtgaccactaagcttctgtct |
| 954 | NM_012207 | HNRPH3 | cagcatctggtctactagactttcttacag |
| 955 | NM_012223 | MYO1B | aaggtgattggtacagggtgcctattttag |
| 956 | NM_012267 | HSPBP1 | gaagaccagaagcacgacagacgagacgag |
| 957 | NM_012317 | LDOC1 | acgttcgaggcgggcgccctcattatttgt |
| 958 | NM_012323 | MAFF | tacagcaagcgagttatcgtcttctgtatt |
| 959 | NM_012334 | MYO10 | tgtccctttgtgtacaaccatgcaaaactg |
| 960 | NM_012384 | GMEB2 | gcaagtatctgcctggtactttgatttaaa |
| 961 | NM_012417 | PITPNC1 | ttaaacatgtaacagttgcagattggctca |
| 962 | NM_012423 | RPL13A | ggcatctgttggactttccacctggtcata |
| 963 | NM_013282 | UHRF1 | agcactgcaaggacgacgtgaacagactct |
| 964 | NM_013314 | BLNK | ggtgaggttgagttatcatgctactaatat |
| 965 | NM_013416 | NCF4 | cttcacctcgatgacgaaaacctaaggagg |
| 966 | NM_014005 | PCDHA6 | attgaatgttctggttcaaggctccacctc |
| 967 | NM_014207 | CD5 | ctctttcatctatagtttggccaccataca |
| 968 | NM_014232 | VAMP2 | gtgttctagaccccccatattatcccagtg |
| 969 | NM_014244 | ADAMTS2 | aatattgtccccccctaccttaagaagata |
| 970 | NM_014298 | QPRT | aatggggcacatttggcactagcttgagcc |
| 971 | NM_014345 | ZNF318 | cacaaacccatatgtatcctttcctcaacc |
| 972 | NM_014365 | HSPB8 | ggtattgtgtatatgggcgggacgtgtgtg |
| 973 | NM_014575 | SCHIP1 | ctgtctctcccaacgtgactatgaattccc |
| 974 | NM_014595 | NT5C | cttacctactcccgtctagaaaatgctgaa |
| 975 | NM_014614 | PSME4 | ttatcttgttacaaaaactgagatgtgggg |
| 976 | NM_014624 | S100A6 | gatataggcatcgcacctctatcatcgtca |
| 977 | NM_014667 | VGLL4 | tgtcagtgaacaagggcgtcactctgggag |
| 978 | NM_014707 | HDAC9 | taatgaaggcactgcttatttgtagtcacc |
| 979 | NM_014724 | ZNF305 | acaagaccgtgtaggtgtcccttcagagag |
| 980 | NM_014734 | KIAA0247 | caggatgtcactcaatcagtttgggtttgc |
| 981 | NM_014735 | PHF16 | catgcctttcaattctgagtgggaggaaaa |
| 982 | NM_014780 | CUL7 | taccttccggtagccctagacttggggtca |
| 983 | NM_014792 | KIAA0125 | gacattgagaattggtacctacaacagtct |
| 984 | NM_014824 | FCHSD2 | gatcacttcagtgacaatacccattaatga |
| 985 | NM_014890 | DOC1 | cacacctcttcctcgacaatcacaaattac |
| 986 | NM_014899 | RHOBTB3 | agtataatattgggaccccataccgttagc |
| 987 | NM_014914 | CENTG2 | tgtttagatttccacgttacacaaacacac |
| 988 | NM_015050 | KIAA0082 | gtgtcttgcagaatcttggatcattaaaga |
| 989 | NM_015069 | ZNF423 | ccagttcaccggacagtgattaaaactatg |
| 990 | NM_015099 | CAMTA2 | gtttatacgaattgccattaaacatcgctg |
| 991 | NM_015147 | KIAA0582 | ttgttgtaaatcccaatctttactgccatg |
| 992 | NM_015149 | RGL1 | taatgcttttagctgctcgcatgcttgtct |
| 993 | NM_015158 | ANKRD15 | ggattcctttttaccgtgtcacatttactt |
| 994 | NM_015166 | MLC1 | tgggggcagaccagagagctcaagtttcag |
| 995 | NM_015196 | KIAA0922 | tatggactaccacagcgaataggaatgcaa |
| 996 | NM_015210 | KIAA0802 | ccaacaggagagatctagttttctcaaggt |
| 997 | NM_015261 | KIAA0056 | ctttattccatttgaaagtgtcaagcccat |
| 998 | NM_015335 | THRAP2 | gctggtacagtacactaaaagactttgata |
| 999 | NM_015436 | RCHY1 | tacgaattttttggtgcatagcatctcagc |
| 1000 | NM_015458 | MTMR9 | gtgtgtaatatttgcgtatggtgttcctct |
| 1001 | NM_015474 | SAMHD1 | ctaagcataagtgaaagacacctcccctca |
| 1002 | NM_015528 | RNF167 | ccttacccacacctatccttttgaggggct |
| 1003 | NM_015568 | PPP1R16B | tgaggtaacttccacgtagccccttgccac |
| 1004 | NM_015570 | AUTS2 | atcggcggagccttcttgtgtaatgtaaac |
| 1005 | NM_015636 | EIF2B4 | gtacctgttgttctacgagtcaagagcagt |
| 1006 | NM_015670 | SENP3 | tgagagaatacttgttgatttctgatgtgc |
| 1007 | NM_015710 | GLTSCR2 | agatgccggagactcgcccttcaataaaaa |
| 1008 | NM_015833 | ADARB1 | ttacaactgcatgagcttcctctcgcacaa |
| 1009 | NM_015855 | WIT-1 | gtctgaggttacaattagaactcctgaccc |
| 1010 | NM_015869 | PPARG | taaactacaattgtttggcaccctctcttc |
| 1011 | NM_015965 | GRIM19 | cgcgctgttgccactgttacaggcagaaac |
| 1012 | NM_016041 | DERL2 | acaccatcctccattcgacccattgacttc |
| 1013 | NM_016091 | EIF3S6IP | aactcagttaacaagttaaggaccgaagtg |
| 1014 | NM_016184 | CLECSF6 | ggtctgtacattgactgattcactttttca |
| 1015 | NM_016195 | MPHOSPH1 | ggatgtaataggtcaggtatttggtttact |
| 1016 | NM_016221 | DCTN4 | atgagctaagtgtcatgcatatttgtgaag |
| 1017 | NM_016308 | UMP-CMPK | gaaagaccccaatttaagccttgcttattt |
| 1018 | NM_016343 | CENPF | ctggtgatggattaacatatagcctttgtt |
| 1019 | NM_016570 | PTX1 | gtatcccccccatattgtgatgatgcaatc |
| 1020 | NM_016734 | PAX5 | agaacactcggaggggcgggaatcagaaga |
| 1021 | NM_017437 | CPSF2 | actatgtgtggaacaacccagtaatatcag |
| 1022 | NM_017448 | LDHC | tggagaacagaagatagcaggctgtgtatt |
| 1023 | NM_017617 | NOTCH1 | atgccagtgagggacgtcagacttggctca |
| 1024 | NM_017771 | PXK | cgttcacaacattctcttaagttctaacag |
| 1025 | NM_017787 | C10orf26 | cagacagaagcttgactgggtcttcaatga |
| 1026 | NM_017794 | KIAA1797 | ttagtacccgggccagttgagactgaaaca |
| 1027 | NM_018136 | ASPM | ttcaagacttaagccagattgggttttgag |
| 1028 | NM_018209 | ARFGAP1 | agggagtcccttttgatgggaagtgcagtc |
| 1029 | NM_018248 | FLJ10858 | atgcttttagtctcttgtaactggggagaa |
| 1030 | NM_018462 | C3orf10 | caatgacataacagagcacgcatcagaaga |
| 1031 | NM_018664 | SNFT | acatccaacaggcgccaaactcacagagcc |
| 1032 | NM_018951 | HOXA10 | gcgtggaaaaagacgatgtttatgttctta |
| 1033 | NM_019028 | ZDHHC13 | ttatgtcgatgccctgtagtttgaaagtga |
| 1034 | NM_019071 | ING3 | gaaggggaaagggcgttaaagtgatacatt |
| 1035 | NM_019102 | HOXA5 | gctgtactaacgaccaccaagacgccacca |
| 1036 | NM_019111 | HLA-DRA | ggcagaatataaacgacgcaccttcttccc |
| 1037 | NM_019841 | TRPV5 | agtaagctgtgaggctattctggctcccca |
| 1038 | NM_019846 | CCL28 | ctttcaggtcctgcatactgatgaaactac |
| 1039 | NM_019857 | CTPS2 | cccatgtcagtttctattgcattgagagcc |
| 1040 | NM_020310 | MNT | cgagacatgaatactatccatgtaataagc |
| 1041 | NM_020368 | SAS10 | cctaactataattattgggccagatacttg |
| 1042 | NM_020371 | AVEN | ccttgtttctagcctccttccttgcagtgt |
| 1043 | NM_020631 | KIAA0720 | aagcactgggaagtaatggggtgtggggtg |
| 1044 | NM_020657 | ZNF304 | aatagttgacagatctaactttcctagtgg |
| 1045 | NM_020841 | OSBPL8 | cagatagttataggccactgttttgtaatg |
| 1046 | NM_020843 | ZNF291 | gcttaataatgggcgataatgtcaagtgat |
| 1047 | NM_020892 | DTX2 | gcgaagacctgacgagagactgtaaaggaa |
| 1048 | NM_020944 | GBA2 | ccctgactgcgtgaaatgttcagggaggtc |
| 1049 | NM_020956 | PRX | aactagcactaaccctaagagggccgggag |
| 1050 | NM_020998 | MST1 | cttcttgtcagacataaagccatgtttcct |
| 1051 | NM_021019 | MYL6 | acagagcacaacaaaggacgagcagcgcca |
| 1052 | NM_021025 | TLX3 | gccgggcgcctgtattatactttgtacttt |
| 1053 | NM_021038 | MBNL1 | ctaccattaaggtgaaatcatggatcagat |
| 1054 | NM_021071 | DO | tgatcctatagctattgcatctctctcctt |
| 1055 | NM_021103 | TMSB10 | acttgtacgcctcccgtgagaccactctgt |
| 1056 | NM_021111 | RECK | agtgctgatgtagcatgcttgttgcaattg |
| 1057 | NM_021114 | SPINK2 | ttatcgcgcgtctatatggccccgatcacc |
| 1058 | NM_021603 | FXYD2 | cctctcttcgcttcacttggactgaccctg |
| 1059 | NM_021643 | TRIB2 | tagtgtgtggcatgtatgtgcagactcttg |
| 1060 | NM_021814 | ELOVL5 | cacatacaattacgtaccatatacagtgct |
| 1061 | NM_021906 | USP9X | agtgcaaagcaatgaaacgtccaatggtta |
| 1062 | NM_021949 | ATP2B3 | gaatggcttggtcaactgtgttcagttcat |
| 1063 | NM_021960 | MCL1 | tcaaatgtagtgtgtttccctaactttctg |
| 1064 | NM_022067 | C14orf133 | ctgacatgcctagactcctaataaaggtat |
| 1065 | NM_022127 | SLC28A3 | tgcacatgaatcatgagtcccttctccact |
| 1066 | NM_022161 | BIRC7 | tgcttggcgtgggggatggcttaactgtac |
| 1067 | NM_022334 | ITGB1BP1 | atctgttcataccgcatgacaccgtccact |
| 1068 | NM_022366 | TFB2M | ctggtttgcctttcagtttgttgaaatgta |
| 1069 | NM_022436 | ABCG5 | ggagttacctgatcacatcgagagagtgct |
| 1070 | NM_022438 | MAL | tgatggatcttaggttgcctgaaggcacgt |
| 1071 | NM_022469 | GREM2 | gctccttctggggttatcgtatgtacaaag |
| 1072 | NM_022549 | FEZ1 | taacaacagctcacagccaaatagagcaat |
| 1073 | NM_022716 | PRRX1 | tagtcatctatccgttcttcacttagcagg |
| 1074 | NM_024006 | VKORC1 | ggatttcagttccccgcgtcctcattaaat |
| 1075 | NM_024099 | MGC2477 | gggaagtaccttcattgggttgttctgaaa |
| 1076 | NM_024319 | C1orf35 | agccatgggcctatgagcggtctaactgtg |
| 1077 | NM_024408 | NOTCH2 | gcatattcctgactaaacgtagtaaggaaa |
| 1078 | NM_024424 | WT1 | aaggcaaagacacgtaaatctctgccaaca |
| 1079 | NM_024713 | C15orf29 | tgagttatttaagaggccagttttcaggac |
| 1080 | NM_024728 | C7orf10 | gctctggtattaatgaatctagtgcctttt |
| 1081 | NM_025263 | PRR3 | aatgggtcaggagttgtattggcaagaggg |
| 1082 | NM_030660 | ATXN3 | ttagtttcagtgttccctatccctcattct |
| 1083 | NM_030674 | SLC38A1 | gggtgatttaagtgagtcacaagtcacaaa |
| 1084 | NM_030915 | LBH | acttctatctgttcttttttgaggctcagg |
| 1085 | NM_030926 | ITM2C | gaggagggctgtaacgccttcagtcagtct |
| 1086 | NM_030935 | THG-1 | agacagcgacgatgatagtggctccggaag |
| 1087 | NM_031243 | HNRPA2B1 | tggtctttgtaagagtgtagaagcattcct |
| 1088 | NM_031423 | CDCA1 | gaaaagttgaagcgaatggaagtatcagaa |
| 1089 | NM_031966 | CCNB1 | gtaaaagtctaccaccgaatccctagtccc |
| 1090 | NM_032121 | DKFZp564K142 | tgagggctagacgtgtgctctgaagaatgg |
| 1091 | NM_033238 | PML | attccgtagggtcttgttcccacgaccgga |
| 1092 | NM_033512 | TSPYL5 | ggtaatttgacaccctgttaataacgcaat |
| 1093 | NM_033554 | HLA-DPA1 | atagcacatttccaactaataacaccccct |
| 1094 | NM_033642 | FGF13 | atacccaaatacgcaccgaataaactcttt |
| 1095 | NM_057168 | WNT16 | ggacatcgaagagaatttaacttagcagtt |
| 1096 | NM_058195 | CDKN2A | gttgtatttcgtcttatgtctcgagttcct |
| 1097 | NM_080284 | ABCA6 | tggccttatttttccaatcccagagcccac |
| 1098 | NM_080700 | TREX2 | atcgagcccatgtacttgccgcctgatgac |
| 1099 | NM_130439 | MXI1 | ggtggtgtagattgtatgagtaagaagtat |
| 1100 | NM_133259 | LRPPRC | caagctctgccctaggcttgttactttata |
| 1101 | NM_133378 | TTN | caacactttgttcgctcattttacgctgtc |
| 1102 | NM_138714 | NFAT5 | tgttctctgggggaatttcatttgcatcta |
| 1103 | NM_144578 | C14orf32 | agtttgagatactaggttttatcacctgct |
| 1104 | NM_144628 | TBC1D20 | aacttgtccatgtgccaagagggtggcgca |
| 1105 | NM_145698 | ACBD5 | gataaccatttctatcctgttccaaagtct |
| 1106 | NM_145867 | LTC4S | aggaacagcgggaagtactcgctgcagttc |
| 1107 | NM_147180 | PPP3R2 | ccttgaactgagagcctgtatctggattta |
| 1108 | NM_152739 | HOXA9 | accgccattgggctactgtagatttgtatc |
| 1109 | NM_152788 | EB-1 | tccttcactttagtggtctaatcaacagat |
| 1110 | NM_152827 | SNX3 | actacaccattggtttccaatactgcacac |
| 1111 | NM_152890 | COL24A1 | cacagcaaaccacacttaacctatctataa |
| 1112 | NM_156038 | CSF3R | ccaggcgatctgcatactttaaggaccaga |
| 1113 | NM_172020 | POM121 | gatttctagaactccctctttgcatagtgc |
| 1114 | NM_173156 | C1orf16 | catcctcactgtggagtaatgagggggagg |
| 1115 | NM_173216 | SIAT1 | gctgcctgtgtctatggggttctgtcttct |
| 1116 | NM_173609 | C15orf21 | tcaaccctcactaaactttgccggttcaga |
| 1117 | NM_173852 | KRTCAP2 | tccaccgagtctgtgtcaccacctgcttca |
| 1118 | NM_175739 | SERPINA9 | tgggatgttgctgggttaccatatttccat |
| 1119 | NM_175744 | RHOC | aggggggcatgaataaaggctacaggctcc |
| 1120 | NM_178586 | PPP2R5C | ctttttagtgtggctttagtatggcttcct |
| 1121 | NM_181311 | TAZ | agaaggcaggtgagcaaccagttggctagg |
| 1122 | NM_181336 | LEMD2 | gccccgtggtgaggccatgttctcataatc |
| 1123 | NM_181339 | IL24 | atatcacttccatgacataagtgctattgc |
| 1124 | NM_181430 | FOXK2 | agatcccaggtctctccgtggtatgtttgt |
| 1125 | NM_181493 | ITPA | gtgattcacttattcgccctccctactttg |
| 1126 | NM_181702 | GEM | atatagaattgggaactgatacatgtgtcc |
| 1127 | NM_182729 | TXNRD1 | gtggagtggaatgttctatccccacaagaa |
| 1128 | NM_182810 | ATF4 | tcaggagcgtcaatgtgcttgtacatagag |
| 1129 | NM_183395 | CIAS1 | gctttttgtagctggttgaaaattcaggaa |
| 1130 | NM_198232 | RNASE1 | ctcaaggcgggttaaacggttactcaaaag |
| 1131 | NM_198400 | NEDD4 | tgcgggacagtcagtaggatcattttcata |
| 1132 | NM_199335 | FYB | ataatacaggaacaggtatagatgtagcct |
| 1133 | NM_199423 | WWP2 | taactgaagtgtctgtacggaatgcccttt |
| 1134 | NM_201592 | GPM6A | gaaatgtagaacagagtgcttgcaaaatgt |
| 1135 | NM_201632 | TCF7 | gttttcaccatagcctacgttaacccattt |
| 1136 | NM_201998 | SF1 | aacactgcgctaaagcggggatgttccatt |
| 1137 | NM_212474 | FN1 | ctaatggagatagctttacactttctgctt |
| 1138 | R14777 | CYFIP2 | cataggatccaactggacaacgtgtgggat |
| 1139 | R56397 | PIK3C3 | tattacatggtacctgagttctgcttcctt |
| 1140 | R59027 | GRP58 | attttagtcccagccttgcagcttacacac |
| 1141 | R72151 | GNL3 | cattgtgagtggaagtagttatctggaata |
| 1142 | R79128 | MAP3K1 | ttgagtttgtttgcagttccctcagcttgc |
| 1143 | R86893 | C6orf110 | ctcccacgtctatgttcacatttgtggtcc |
| 1144 | T07281 | NRIP1 | aaagaatgtgctttgattcgaagggtctta |
| 1145 | T28925 | ITGAL | cgtgggacatctagtaggtgcttgacataa |
| 1146 | U60115 | FHL1 | catctaacgtttcagtgtatccttacagaa |
| 1147 | U79271 | AXT3 | atatgccacaacgcaccacgaccttcccag |
| 1148 | W04885 | MYL4 | ggcggtggggtctagattccacatttatgt |
| 1149 | X66087 | MYBL1 | atacttgcatggaaactgactacacataca |
| 1150 | AK024272 | | gaacattccaacagcagaatacatgttctt |
| 1151 | AK025231 | IGLC2 | gatgggatttcacctaattttaatgtggct |
| 1152 | AL080190 | | tctccttcgtgtgttcacctctcccccaga |
| 1153 | BU618233 | | agaggcaactttgcggtccatcacgcaatc |

TABLE 21
50mer polynucleotide probes, according to one embodiment

| | GenBank | | |
|---|---|---|---|
| | Accession No. | | |
| SEQ ID NO: | for Target gene | Symbol | 50mer |
| 1154 | AA594161 | MYH11 | atgaagttgagagcgtcacagggatgcttaacgaggccgaggggaaggcc |
| 1155 | AA766908 | MME | ttttagtccaaataacaagtaccaaagttttatcaagtttgggtctgtgc |
| 1156 | AB014540 | SWAP70 | ttaggagtcaaatagtctctgcatggtggggaggatcatgatggaatatg |
| 1157 | AF196185 | PARD3 | cacgtgcggcggtgtctaagtggtgttaccagtgtacgcgcagtgacctt |
| 1158 | AI597616 | MRPL33 | actgagggcggggatactgattcagaaaccctgtagcgtgtaataaaaga |
| 1159 | AI634809 | ARID5B | aagcttagctggtcatatttctacttgcttccttttagcttctgccttgc |
| 1160 | AI672553 | AKAP12 | gctggactgcattcacacatggcatgaaataagtcaggttctttacaaat |
| 1161 | AI809213 | RGS13 | atgagatttctatcgtacagggcaagcctacattgtggacatattctaga |
| 1162 | AK022231 | STAT1 | ataatatgcacacagtgctttccgtggcactgcatacaatctgaggcctc |
| 1163 | AK022293 | CTSD | gcacccctagctcttgggatgtttgtatccaactccgggcaatgtggggc |
| 1164 | AK055652 | C3orf6 | tgggttctgatgggaatatatacactcatctggactaggccaatggaagc |
| 1165 | AL080130 | FLJ14001 | atttagctgcataaaacgttcggctcatttatctgacatcttagtcacat |
| 1166 | AL833316 | MIR | tttttgggccttaggcgtttcgttcatcctgctaaggggatgaagcaaac |
| 1167 | AW291384 | STS-1 | caaatgcatcaattataccagggatgtatagtaagtcagggaactaatat |
| 1168 | BG993697 | SMYD3 | cctttccatgctacacaagcaagaaatgcctataaagacagacttgagtg |
| 1169 | BI769730 | HLA-DRB1 | gaaatatgcacaatcgcggtgtacgaggagcatacgccacacttatgatt |
| 1170 | BQ632574 | RASA1 | tcccgtgatttagcagcattgcatgagatttgcgtggctcattcagatga |
| 1171 | BX504817 | SFRS7 | catcaagtttattcggtagtttgaccgctagtatgttggaagttatttgg |
| 1172 | H53164 | IRF8 | cagcaccaatcccgcattcagaacctcccagtgaaagggcagccttcatt |
| 1173 | H57732 | TGFBR2 | aatgtgtccaaaaggttggatggcaaggtttgggtgctactgccttggca |
| 1174 | L29376 | 3.8-1 | tatatgtacagtttcacatatgtataaaaacagtagtttgggggcctctt |
| 1175 | M80899 | AHNAK | aaaggccctaaatttaagatgccagacatgcacttcaaggcccccaagat |
| 1176 | NM_000038 | APC | aagcagcctagcacagactaagcattgagcataataggcccacataattt |
| 1177 | NM_000043 | FAS | ttcgtgagctcgtctctgatctcgcgcaagagtgacacacaggtgttcaa |
| 1178 | NM_000061 | BTK | atttccagtccggtggtccccaccggaagtcctgatgtatagcaagttca |
| 1179 | NM_000075 | CDK4 | cagaggtagaacgcatatcgacgtagacttatcgttacaactaattagaa |
| 1180 | NM_000109 | DMD | tcagcctatgctgctccgagtggttggcagtcaaacttcggactccatgg |
| 1181 | NM_000189 | HK2 | atacagtggatctcaatcttcggggtgtgatgaatagcgaatcatctcaa |
| 1182 | NM_000237 | LPL | tcgtgcctataaatagtaggaccaatgttgtgattaacatcatcaggctt |
| 1183 | NM_000269 | NME1 | gtggaaatgcgtgtcacggccccgtcttaccgctagttccctgcatagca |
| 1184 | NM_000271 | NPC1 | ggaatgcacagttgacttgggaagcagtattactagatctggaggcaacc |
| 1185 | NM_000295 | SERPINA1 | tgctccctccgtctctaccaggaatggccttgtcctatggaaggcactgc |
| 1186 | NM_000313 | PROS1 | taatatatcggatacaggccctaagtctatgttccgatcaacaatctcat |
| 1187 | NM_000397 | CYBB | cccttggagccacaaatgtttagaactcttcaacttcggtaatgaggaag |
| 1188 | NM_000405 | GM2A | gtataactgtgagtcttggagccatagtaatgtttctcatgccccccaaa |
| 1189 | NM_000424 | KRT5 | ttatccttttctggagagtagtctagaccaagccaattgcagaaccacat |
| 1190 | NM_000483 | APOC2 | catacctgcccgctgtagatgagaaactcagggacttgtacagcaaaagc |
| 1191 | NM_000576 | IL1B | aagaatctgtacctgtcctgcgtgttgaaagatgataagcccactctaca |
| 1192 | NM_000579 | CCR5 | ccttttgctcttaagttgtggagagtgcaacagtagcataggaccctacc |
| 1193 | NM_000584 | IL8 | ctattaaaacagccaaaactccacagtcaatattagtaatttcttgctgg |
| 1194 | NM_000585 | IL15 | ttatttcacttgagtccggagatgcaagtattcatgatacagtagaaaat |
| 1195 | NM_000600 | IL6 | gagcccagctatgaactccttctccacaagcgccttcggtccagttgcct |
| 1196 | NM_000626 | CD79B | tagtgacgctgcggacaggggaagtgaagtggtctgtaggtgagcaccca |
| 1197 | NM_000627 | LTBP1 | gctgctgtacatcaggcgcgggatggggagataactgcgaaatcttcccc |
| 1198 | NM_000633 | BCL2 | atggcaaatgaccagcagattcaaatctatggtggtttgacctttagaga |
| 1199 | NM_000655 | SELL | gtagcctcgccgtctgtgaattggaccatcctatttaactggcttcagcc |
| 1200 | NM_000713 | BLVRB | aatgacctcagtcccacgacagtgatgtccgagggcgcccggaacattgt |
| 1201 | NM_000785 | CYP27B1 | cttgcccctaggaaggtgaatctgccctagcctggtttacggtttcttat |
| 1202 | NM_000788 | DCK | cttaagtataaaccttatgaactacagtggagctacactcattgaaatgt |
| 1203 | NM_000853 | GSTT1 | aatctcaggatggacgcacctccgatgaattcctctgacattctgccagg |
| 1204 | NM_000877 | IL1R1 | gaaatagccaccgtctacagatggcttagttaagtcatccacagcccaag |
| 1205 | NM_000917 | P4HA1 | tcagcgtcacataaaaagagcatgtaggatgggacatattgggatgtatt |
| 1206 | NM_000927 | ABCB1 | atacatggttttccgatccatgctcagacaggatgtgagttggtttgatg |
| 1207 | NM_001067 | TOP2A | gttatattgataaccatgctcagcaatgagctattagattcattttggga |
| 1208 | NM_001068 | TOP2B | tgtccttaagcacaacagtcataccagcacaacgcaatgcttatgtcct |
| 1209 | NM_001110 | ADAM10 | ggaagacatttcaacctacgaatgaagagggacacttcccttttcagtga |
| 1210 | NM_001154 | ANXA5 | tatagtcccagatgtatctcccttaatcatggaataaagagaggtggcaa |
| 1211 | NM_001166 | BLRC2 | agagtataatggaagatagcacgatcttgtcagattggacaaacagcaac |
| 1212 | NM_001196 | BID | tgctttcctcaaacaggatactgcctgctgtaagaccatcctctatggtt |
| 1213 | NM_001230 | CASP10 | ttattgcctctttcacattgaaacccaggagtggataacactggcttcag |
| 1214 | NM_001238 | CCNE1 | tatggtatacttgctgcttcggccttgtatcatttctcgtcatctgaatt |
| 1215 | NM_001242 | TNFRSF7 | acctgaattcccaccgcagagagtgttgtggccgtgaggacttttctgtc |
| 1216 | NM_001254 | CDC6 | ttttagactcgttgagtttcttgggcactcccaagggcgttggggtcata |
| 1217 | NM_001350 | DAXX | gggataacatttggaggaaggtgggaagcagatgactgaggaagggatgg |
| 1218 | NM_001425 | EMP3 | cagctttgcaccagcgtggcggtgtttactggcggccttgatctatgcca |
| 1219 | NM_001552 | IGFBP4 | ggcttgactggatggaaggagacttaggaacctaccagttggccatgatg |
| 1220 | NM_001558 | IL10RA | actgacttgtctaattcgtagggatgtgaggttctgctgaggaaatgggt |
| 1221 | NM_001618 | PARP1 | ggtgtagacgttcctcttgggaccgggatttcatctggtgtgatagacac |
| 1222 | NM_001621 | AHR | catgaggtatctaaggatttagaccagaggtctagattaatactctattt |
| 1223 | NM_001647 | APOD | tctgcccctagtgtgtgttgcgtgtccgctccacggcgtacatgttgctt |
| 1224 | NM_001663 | ARF6 | tggttagctggttaggaccagtaactggattgcgaccactatgataatat |
| 1225 | NM_001706 | BCL6 | tgtttgtctcatcccattctgcgtcatgcttgtgttataactactccgga |
| 1226 | NM_001760 | CCND3 | cctgttgacacaggtctttcctaaggctgcaaggtttaggctggtggccc |
| 1227 | NM_001762 | CCT6A | agatgatggaaggtgtggtgactaagggccacggttattgggtgaaattt |
| 1228 | NM_001770 | CD19 | acacctgactctgaaatctgaagacctcgagcagatgatgccaacctctg |
| 1229 | NM_001771 | CD22 | ttggaagtgaggcattgcacggggagacgtacgtatcagcggccccttga |
| 1230 | NM_001779 | CD58 | gttcctttcatcacaacaaacgttatggagattatgcgataccaggcact |
| 1231 | NM_001781 | CD69 | gatgtggcaaatctctattaggaaatattctgtaatcttcagacctagaa |
| 1232 | NM_001782 | CD72 | agttgactgatgatacacaacgcactaggacttatgctcaaagctcaaaa |
| 1233 | NM_001826 | CKS1B | gatcatgtcgcacaaacaaatttactattcggacaaatacgacgacgagg |
| 1234 | NM_001827 | CKS2 | cagctaaacactcctgcggtcgtatggtcgacaacaatcacacataaaat |
| 1235 | NM_001831 | CLU | acttaaagcttagcttatgtccaaggtaagtattttagcatggctgtcaa |
| 1236 | NM_001852 | COL9A2 | ctgaaggaatagggcggctttccttccagcgagcatcattcggctgttac |
| 1237 | NM_001853 | COL9A3 | accctcatcgggctgtcgcctgacagcatacctcaaaaggccctagctaa |
| 1238 | NM_001877 | CR2 | cttcttaccttcttgattgtcattaccttatacgtgatatcaaaacacag |
| 1239 | NM_001888 | CRYM | tttatgtttgtagttggaaagcaaagctaggtagccatttcttctgttct |
| 1240 | NM_001894 | CSNK1E | gccagcccgaattcccgttctcctgtgtctactaacaaggacatgggggt |
| 1241 | NM_001951 | E2F5 | gacattccactttcctaggttataggaaagatctgtttatgtagtttgtt |
| 1242 | NM_001967 | EIF4A2 | aatatccttgctgcgtaaactgcacgggtctttaagctccagacgttttc |
| 1243 | NM_002002 | FCER2 | tgtgtgcaacacgtgccctgaaaagtggatcaatttccaacggaagtgct |
| 1244 | NM_002051 | GATA3 | tgaataagccattctgactcatatcccctatttaacagggtctctagtgc |
| 1245 | NM_002095 | GTF2E2 | acagaaaaagcgacgctttaagactcataacgaacacttggctggagtgc |
| 1246 | NM_002101 | GYPC | taactgagcatacccagtgggccaacaagcacgctctaaatacaaaacca |
| 1247 | NM_002105 | H2AFX | gcctacccaccaatccttaacgcgcctcaccggaccttaacattccaccc |
| 1248 | NM_002120 | HLA-DOB | cattgccaagggcattgtccagaaactcccctgagaccttactccttcca |
| 1249 | NM_002122 | HLA-DQA1 | gccacccggctacctaattcctcagtaacctccatctaaaatctccaagg |
| 1250 | NM_002155 | HSPA6 | tatcttatatatctgtattcgcatggtaacatatcttcggccttcctgag |
| 1251 | NM_002189 | IL15RA | cggtacatttgtaactctggtttcaagcgtaaagccggcacgtccagcct |
| 1252 | NM_002211 | ITGB1 | gttatactgtggctatgcaacagctctcacctacgcgagtcttactttga |
| 1253 | NM_002217 | ITIH3 | tgactacattgtccccaacctgttttgagtagacacaccagctcctgttg |
| 1254 | NM_002250 | KCNN4 | taactcaccagcctctgctcttatctttgtaataaatgttaaagccagaa |
| 1255 | NM_002305 | LGALS1 | tggcggcggatggagacttcaagattaagtgcgtggcctttgagtgaagc |
| 1256 | NM_002350 | LYN | tgatttcatgtgcggggatcatctgccgtgcctggatcctgaaatagagg |
| 1257 | NM_002358 | MAD2L1 | ccagaacatgttacaccactcctacgatggcttgcccgattcgatgcccc |
| 1258 | NM_002426 | MMP12 | aaatagttaccttcaaaggccaagagaattctatttgaagcatgctctgt |
| 1259 | NM_002467 | MYC | tcctcaagaggtgccacgtctccacacatcagcacaactacgcagcgcct |
| 1260 | NM_002526 | NT5E | gcagcaaaataatagcctcggttctatgcatatatggattagctataaaa |
| 1261 | NM_002567 | PBP | accccccacgatccaagagaaaaaccgatagcacgtaacccgctgctcag |
| 1262 | NM_002646 | PIK3C2B | gctcattttattatgacctatatgctcctgatttaaagagatctgtgtac |
| 1263 | NM_002661 | PLCG2 | agaagatatgttcagcgatcccaactttcttgctcatgccacttacccca |
| 1264 | NM_002692 | POLE2 | ttccacccactgagccctctagtactactagggcatactatggaaatatt |
| 1265 | NM_002738 | PRKCB1 | aaattgtgagtaagctttgcagttactgtgaactattgtctcttggagga |
| 1266 | NM_002752 | MAPK9 | acgaagctctgcgtcacccatacatcactgtttggtatgaccccgccgaa |
| 1267 | NM_002832 | PTPN7 | ctcaaataataccctgggtatgcaggacccactataccttgcatttgctg |
| 1268 | NM_002838 | PTPRC | cttatgattataaccgtgttgaactctctgagataaacggagatgcaggg |
| 1269 | NM_002891 | RASGRF1 | cccggggacatgtgctagatgatactgtacatattcgtttggtttcactg |
| 1270 | NM_002892 | ARID4A | agaggcagaagtcaaaacggggacgacctcctttaaaatcaaccctctca |
| 1271 | NM_002943 | RORA | acctaataaacacaacttttactaattatctatactactacaa |
| 1272 | NM_002966 | S100A10 | acggatcgctcccatgtttggtccacttaccacccactttgtgtttcctt |
| 1273 | NM_002967 | SAFB | cttggccatcaaataagtaggcatagagtgtgactcgccctctcttggtc |
| 1274 | NM_003037 | SLAMF1 | aggccctccacgttatctaggagatcgctacaagttttatctggagaatc |
| 1275 | NM_003088 | FSCN1 | actttgacatcgagtggcgtgaccggcgcatcacactgagggcgtccaat |
| 1276 | NM_003177 | SYK | ctgcaagaaatgtgttgctagttacccaacattacgccaagatcagtgat |
| 1277 | NM_003217 | TEGT | acttccttcctgttaaacccctgttaactctccataaatttggtgattct |
| 1278 | NM_003226 | TFF3 | tgtatccgaaacacggtgacaccgctggtgccggctaaacccccattgtg |
| 1279 | NM_003243 | TGFBR3 | caggtgagaacatccataatttggggccctgagttttacccagactcaag |
| 1280 | NM_003254 | TIMP1 | atacatcttggtcatcttgatctcataacgctggtataaggtggtctggt |
| 1281 | NM_003290 | TPM4 | ccttatgagaagaggccagaacttggttatcctcttccaatgtgaggaca |
| 1282 | NM_003299 | TRA1 | ggatctaaaaagagcgattacattaagctctatgtgcgccgtgtattcat |
| 1283 | NM_003332 | TYROBP | tgagagaccagaccgctccccaatactctcctaaaataaacatgaagcac |
| 1284 | NM_003362 | UNG | gttcactgatgcagttgtgtcctggctaaatcagaactcgaatggccttg |
| 1285 | NM_003451 | ZNF177 | gactgatgtactgtggcagacagaactagttgctgtctcaatatccattc |
| 1286 | NM_003648 | DGKD | tcttgccaagcgcagtcgcagtggtaaattccgcctcgtgaccaagttta |
| 1287 | NM_003656 | CAMK1 | caaagagtttggcatcattctcgtcatagaagggagggtaaccgcagagc |
| 1288 | NM_003810 | TNFSF10 | aaaagagagaagaggcaccactaaaagatcgcagtttgcctggtgcagtg |
| 1289 | NM_003875 | GMPS | tctggctaggcttatacctcgcatgtgtcacaacgttaacagagttgttt |
| 1290 | NM_003959 | HIP1R | acatccgggagattggagacctgtggggacatttgcatgaccgctacgga |
| 1291 | NM_004049 | BCL2A1 | aatctggctggatgacttttctagaagttacaggaaagatctgtgaaatg |
| 1292 | NM_004073 | PLK3 | ataagcctgagccttagctcccagctagggggcgttatttatggaccact |
| 1293 | NM_004091 | E2F2 | acccaaatactcacaagggtcttatcagacgcccgtcttaaagtccagca |
| 1294 | NM_004117 | FKBP5 | ttcagtccttacgggtaaacagattgagcatggctctctattccctcagc |
| 1295 | NM_004126 | GNG11 | atcacccaagagccataatacacctattataagcgaccagcataataaag |
| 1296 | NM_004184 | WARS | ggccctcacagatgtctaggcaggcctcatttcatcacgcagcatgtgca |
| 1297 | NM_004271 | LY86 | tcagcccgcgcgtggaaccgagacaagtaaacaagacgccagatctctga |
| 1298 | NM_004289 | NFE2L3 | cactgaccatgaatctagttcccatcatgacttagaaggtgctgtaggtg |
| 1299 | NM_004322 | BAD | cctagcacaaaataagggcataagaaatactagttacatcacaaggtcag |
| 1300 | NM_004354 | CCNG2 | tcacacatgcaaattgtcagcttattgagacaacccacttagattcatat |
| 1301 | NM_004356 | CD81 | cgtcgccttcaactgtaatcacaacatcctgactccgtcatttaataaag |
| 1302 | NM_004358 | CDC25B | gagattactctaaggccttcctcctacagacagtagacggaaagcaccaa |
| 1303 | NM_004422 | DVL2 | aggaagctgggagatttgggccatgtagctgcctttgttactctatttat |
| 1304 | NM_004445 | EPHB6 | agcccaggactcggggtgaagtattacatcgacccctccacctacgagga |
| 1305 | NM_004510 | SP110 | tgatggttttagcaatacctaaatccgtgatatcatcagaggttgcaaaa |
| 1306 | NM_004529 | MLLT3 | gaaatcaacgttaccgccatttgatgatattgtggatcccaatgattcag |
| 1307 | NM_004556 | NFKBIE | cagacccttgtccttgctgtggaaatgatgagggatggagggacaagagg |
| 1308 | NM_004577 | PSPH | tgtgatcaggcaacaagtcaaggataacgccaaatggtatatcactgatt |
| 1309 | NM_004619 | TRAF5 | attctgggccggtaccaggttggtattactcatgaacgatatctgctttt |
| 1310 | NM_004635 | MAPKAPK3 | ttgatcctctacaactggtgttgctcccgttatgcggacagaagacagcc |
| 1311 | NM_004737 | LARGE | gttccaacaagcaataccgcatctgtctcaaaaccctcaaggaagagttt |
| 1312 | NM_004844 | SH3BP5 | gctatcattctagggctggatttccctaactccagttattctgctgctgc |
| 1313 | NM_004851 | NAPSA | gcgcagcgggtggtcgcggaggtcctgctacccagtaaaaatccactatt |
| 1314 | NM_004951 | EBI2 | gaggatgctgaaacggcaagtcagtgtatcgatttctagtgctgtgaagt |
| 1315 | NM_005013 | NUCB2 | gcggcaacaagtgatctggaacactatgacaagactcgtcatgaagaatt |
| 1316 | NM_005077 | TLE1 | atgggttgtaggattgaggaacggaatctgccgactcacatgacagccca |
| 1317 | NM_005127 | CLECSF2 | tttgtacctgtctggttaattctgcttacgtgtcaggctacacataaaag |
| 1318 | NM_005211 | CSF1R | gctgactcatcctaactaacagtcacgccgtgggatgtctctgtccacat |
| 1319 | NM_005213 | CSTA | aacactttgggtacatgctgctaaaagcccgtcagctcgtcatccttgtt |
| 1320 | NM_005214 | CTLA4 | caccttatatttacgtatgagacgtttatagccgaaatgatcttttcaag |
| 1321 | NM_005271 | GLUD1 | aacagtagtgtccccatgaagtgctagataatatatgtgtaagagtcagc |
| 1322 | NM_005292 | GPR18 | gtcattagtgtcatgctataccgtaattaccttcgaagcatgcgcagaaa |
| 1323 | NM_005347 | HSPA5 | aaggctctcactaccgtggaccacctagtctgtaactctttctgaggagc |
| 1324 | NM_005348 | HSPCA | agttgacaattctgcatgtactagtcctctagaaataggttaaactgaag |
| 1325 | NM_005415 | SLC20A1 | ctccaagaagcgaattcgaatggacagttacaccagttactgcaatgctg |
| 1326 | NM_005449 | TOSO | tagttgacaggtaagctgtaggcatgtagagcaattgtcccaatgccact |
| 1327 | NM_005461 | MAFB | tttaactttagcatgttgttgatcatggatcatactccccttgtttcttt |
| 1328 | NM_005531 | IFI16 | ctgctttgaattggcaccgaaaagtgggaataccggggagttgagatctg |
| 1329 | NM_005582 | LY64 | ccaaacgggaatatccaatctcgagtttattccagtgcacaatctggaaa |
| 1330 | NM_005601 | NKG7 | cgtccactcccccgctatccaacgtcacatctaagcactatgacatgcac |
| 1331 | NM_005606 | LGMN | ctggcactcccccacgtacgagtatgcgttgagacatttgtacgtgctgg |
| 1332 | NM_005610 | RBBP4 | gcatctctagcccactttatatcctgccaccagtacttcttgtaatccca |
| 1333 | NM_005623 | CCL8 | tgttgtggggtcctcccatggatcatcaaggtgaaacactttggtattct |
| 1334 | NM_005638 | SYBL1 | gcatgttttagggatcaattacctaactgttccttggtctatttatgtat |
| 1335 | NM_005652 | TERF2 | acaggagcatggttcctaataatagcccctgatagtctgctctttctttc |
| 1336 | NM_005658 | TRAF1 | atccctactcaccgagtgttgagcccaaggggggatttgtagaacaagcc |
| 1337 | NM_005856 | RAMP3 | tctcatcccgctgatcgttatacccgtcgttctgactgtcgccatggctg |
| 1338 | NM_005935 | MLLT2 | ttgttttgggtcccacttaggattaacggatgtaaggtattttcctgtgc |
| 1339 | NM_005950 | MT1G | acattatcaactagatactacacataccagcaccactactcacactacag |
| 1340 | NM_005951 | MT1H | gtaaaatccaggattttatattcctacaactccgactcatttgctacatt |
| 1341 | NM_006006 | ZBTB16 | gcctgagaagcatctgggcatctactccgtgttgcccaaccacaaggctg |
| 1342 | NM_006014 | DXS9879E | acaacaccagcgcccaatatacgcgaatgaggcgccctatacccgcctct |
| 1343 | NM_006115 | PRAME | tctaagtggggtcatgctgaccgatgtaagtcccgagcccctccaagctc |
| 1344 | NM_006162 | NFATC1 | tgcttattacgtatgattactcacagcgatctattgttccatataaccaa |
| 1345 | NM_006164 | NFE2L2 | ggccagtaaacacctgttcctgagtgatacatctttaaggagccggtaga |
| 1346 | NM_006195 | PBX3 | ttctgtagcttagagtgctcacttactacctctgaacaatactcacgctg |
| 1347 | NM_006218 | PIK3CA | actgtgtgggacttattgaggtggtgcgaaattctcacactattatgcaa |
| 1348 | NM_006254 | PRKCD | tccgtgtggacacgccacattatccccgctggatcaccaaggagtccaag |
| 1349 | NM_006257 | PRKCQ | gacaagtaatcactaacccgttttattctattcctatctgtggatgtgta |
| 1350 | NM_006274 | CCL19 | acctcagccaagatgaagcgccgcagcagttaacctatgaccgtgcagag |
| 1351 | NM_006317 | BASP1 | ggccccggcagctaattccgaccaaaccgtaaccgtgaaagagtgacaag |
| 1352 | NM_006332 | IFI30 | atgcaccgcttgtcaatgtgaccctctactatgaagcactgtgcggtggc |
| 1353 | NM_006475 | POSTN | aagactgcttcagggagacacacccgtgaggaagttgcaagccaacaaaa |
| 1354 | NM_006498 | LGALS2 | ctgtgctcagggtctcaactcgtggtcaagcttatatcctagaatattac |
| 1355 | NM_006558 | KHDRBS3 | cagccaccgaatgcttaagaactcatctaagccagtcctctcattgattg |
| 1356 | NM_006620 | HBSIL | ttagatttaagtctgactgaggcatgttcaaagacactacactgcctctc |
| 1357 | NM_006644 | HSPH1 | gctcaggctaaaaagagtcttgatcaggatccagttgtacgtgctcagga |
| 1358 | NM_006734 | HIVEP2 | gaactaaggctacacagagggtcgcacttggactctgagggttgggtgtg |
| 1359 | NM_006763 | BTG2 | tacaatccaaatttgtcgtagacttgtgcaatatatactgttgtgggttg |
| 1360 | NM_006841 | SLC38A3 | tgcggcatgtgcttattgccgttggcctgctcacttgtatcaacctgctg |
| 1361 | NM_006889 | CD86 | ataaatttgacctgctcatctatacacggttacccagaacctaagaagat |
| 1362 | NM_006892 | DNMT3B | agggctggagtctgcacgggacctattagagtattttccacaatgatgat |
| 1363 | NM_006986 | MAGED1 | tccttctaaacacagctatctagagagccacatcctgttgactgaaagtg |
| 1364 | NM_007311 | BZRP | cctctactgactcctccggtgagggaagctattaaagcagaaggggttgc |
| 1365 | NM_007360 | KLRK1 | cagagaagagattacaccagcggtaacactgccaaccgagactaaaggaa |
| 1366 | NM_007361 | NID2 | ctgatgagtatctcccagaacaacgatctcacctctacgggataactgca |
| 1367 | NM_012203 | GRHPR | gtattactcattagtgcacaagtattacttagtgcacaatatacagtctc |
| 1368 | NM_012448 | STAT5B | agtttcagctccgtgtgtgagatgtgcaggttttttctagggggtagggg |
| 1369 | NM_012452 | TNFRSF13B | actgacacctgtctgggggcgttctacgctggtgattgcccttagctcct |
| 1370 | NM_013230 | CD24 | actccccgaagtcttttgttcgcatggtcacacactgatgcttagatgtt |
| 1371 | NM_014246 | CELSR1 | agtggaacgtgccggaactttttgtccattccctagtaggcctgccacag |
| 1372 | NM_014257 | CD209L | cacggggtaactgcgatcattgcacttggtgttcacagtgggccaggcac |
| 1373 | NM_014338 | PISD | acctgcatcactaccgcaacctcagcgagttcttccggcgcaagctgaag |
| 1374 | NM_014456 | PDCD4 | gaattagcactggatactcctagagcaccacagttggtgggccagtttat |
| 1375 | NM_014686 | KIAA0335 | gggccagtcacatcagggctctccgttggtgacaaggcataattctgctg |
| 1376 | NM_014762 | DHCR24 | attactacaagccgtggttctttaagcatgtggagaactatctgaagaca |
| 1377 | NM_015187 | KIAA0746 | gaggatcctgcgttaatctatgactatgccattgtgctattcaagggtca |
| 1378 | NM_015641 | TES | ccctaataccaaggcgctacgtttattgcctcgtcttattcactgacctt |
| 1379 | NM_015866 | PRDM2 | aaaatgccttccgacgaatgggacagcccaaaaggcttaactttagtgtt |
| 1380 | NM_016076 | PNAS-4 | cttcacttttgctaccttgatatagcattgggctatcatgttacaacatt |
| 1381 | NM_016081 | KIAA0992 | accgcacttatatgcattgctagtatggaatttaagataccatacacagt |
| 1382 | NM_016187 | BIN2 | acacttgcctatacagagacataaccacacacactcagaggatagtgaac |
| 1383 | NM_016336 | UBE2J1 | tacccaacctgtagctaagaatacctccatgagccctcgacagcgccggg |
| 1384 | NM_016628 | WAC | gcaggcatcaagattacgcgaagaagcgcataacatgggaactattcaca |
| 1385 | NM_017530 | LOC55565 | cgccacctcttaatccactcggaggaccagcgatctaactgtgctgtgtg |
| 1386 | NM_017784 | OSBPL10 | caagttcatgggcatgtccgtgggggtctctatgataggggaaggtgtgt |
| 1387 | NM_017935 | BANK1 | ctcacattcagagttccagtcattattgttacatcatgtttgcagaaacc |
| 1388 | NM_017955 | CDCA4 | atgtcattcataaccccttgatctgtagtgtcatgggtgctgccgcaggc |
| 1389 | NM_018442 | IQWD1 | ctggtcaccattagaagagtcaaggatttttaaccgaaaacttgctgatg |
| 1390 | NM_018842 | BAIAP2L1 | ctgtgaaactccgcccgactgtgacgaatgatcgctcggcacccatcatt |
| 1391 | NM_020151 | STARD7 | acaagtgcgaaggagttgcggttgctccatgttctgacttagggcaattt |
| 1392 | NM_020199 | C5orf15 | ctcctgcttgtgtccgccgctctatccagtgttgtatcacggactgattc |
| 1393 | NM_020529 | NFKBIA | catgccgataagtaaacgtcgaacaattgcccttcaaccactccctctaa |
| 1394 | NM_020992 | PDLIM1 | tggacatcagccaaatttgaacccaatcaaatataacgtgtctgacactg |
| 1395 | NM_021813 | BACH2 | tgtgtgtgcaaatcctgggatgcccgtttcacgctctgacataaagacat |
| 1396 | NM_021822 | APOBEC3G | ctactaatccagcgacaatttgaatcggttttgtaggtagaggaataaaa |
| 1397 | NM_021950 | MS4A1 | accacaccccatgagggaagctctaaatagccaacacccatctgtttttt |
| 1398 | NM_021966 | TCL1A | gtttctgttcaccttcgtttactatgcctgtgtcttctccaccacgctgg |
| 1399 | NM_022552 | DNMT3A | atgtacgtcggggacgtccgcagcgtcacacagaagcatatccaggagtg |
| 1400 | NM_023037 | 13CDNA73 | aaaaggcaatcgggcactggaccagtttaccctggcgagctttggagaag |
| 1401 | NM_024708 | ASB7 | aacacacggaactatgaaggacagaccccattggctgtttcaataagtat |
| 1402 | NM_025113 | C13orf18 | gaattccttctcaccagaggtatttgtgctgcctgttgatgtagaaaagg |
| 1403 | NM_025216 | WNT10A | cgagacacaacacttgtcctcttggaggttacattcttgctggggggagg |
| 1404 | NM_030666 | SERPINB1 | ttttctttattcggcataattcctcaggtagcatcctattcttggggaga |
| 1405 | NM_030764 | SPAP1 | tgatgccggcaaatattactgtagagctgacaacggccatgtgcctatcc |
| 1406 | NM_030775 | WNT5B | gctgtgtataagatggcagacgtagcctgcaaatgccacggcgtctcggg |
| 1407 | NM_031305 | ARHGAP24 | gttacaaaaggcataatcggaaatagagactacatacttgagtttatggg |
| 1408 | NM_031942 | CDCA7 | caatgtttgatgcataattggaccttgaatcgataagtgtaaatacagct |
| 1409 | NM_032991 | CASP3 | tttcttgttgctcaaaaaatgagctcgcatttgtcaatgacagtttcttt |
| 1410 | NM_033208 | TIGD7 | aacagaaacgctcagccggtgttccggtaagaggcgtggagcttcaggct |
| 1411 | NM_033274 | ADAM19 | acccccaacgcgtcctctcacaccgtccactgtgcgtttgtatgtgtctg |
| 1412 | NM_057735 | CCNE2 | catgtaggttgcttggtaataacctttttgtatatcacaatttgggtgaa |
| 1413 | NM_078467 | CDKN1A | ctgaagtgcttagtgtacttggagtattggggtctgaccccaaacacctt |
| 1414 | NM_079421 | CDKN2D | gcttgttttccagtctcttgtacagcgttttaaaagaaatggattctatt |
| 1415 | NM_080593 | HIST1H2BK | ggggcgattctcttgttgttccgatagtgtctcgcgggcgaaaccaccag |
| 1416 | NM_138340 | ABHD3 | ggaattccagtattgtgtctaaattctgtggatgatgttttctcacccag |
| 1417 | NM_138379 | TIMD4 | acgaagacggcctttttaccctctaacaacgcagtagcatgttagattga |
| 1418 | NM_139207 | NAP1L1 | aggtagaagtagaggcctaccttgaattaagggttatactcagtttttaa |
| 1419 | NM_139276 | STAT3 | gtgatatccagtggcacttgtaatggcgtcttcattcagttcatgcaggg |
| 1420 | NM_144646 | IGJ | gaataagcctaacacagtagaaattgctgtatggtgtagataaaacaatc |
| 1421 | NM_145804 | ABTB2 | ttgttcaatcactgatgggcaaaggggagatgtagctaactggtggccct |
| 1422 | NM_152785 | GCET2 | ctgatggccttgtacagagaacccgatgattgatgagggtatagcacagc |
| 1423 | NM_172373 | ELF1 | taaaccaccacgaccagattccccagccactacgccaaatatatctgtga |
| 1424 | NM_173624 | FLJ40504 | aaaaaattggccgtcaaaacctgagtcctgtcctcttgccctcctccccg |
| 1425 | NM_175870 | LOC90925 | ctgtcataaacattggatttcccgcggagtaacctggcgacatatttaga |
| 1426 | NM_177968 | PPM1B | atctgtattgaactttcggccctagaaaccagtggagttatttcaccaca |
| 1427 | NM_181443 | BTBD3 | gcaaattggtagaccttataagaaggcacttgtttgtaagccagagaaga |
| 1428 | NM_181838 | UBE2D2 | aaaacacagaggcattgctatttggtaagttaagcttctgtgattgtaat |
| 1429 | NM_182746 | MCM4 | tacattgcctacgcgcacagcaccatcatgccgcggctaagtgaggaagc |
| 1430 | NM_182776 | MCM7 | atatttgccaccgtccgtgaactggtctcagggggccgaagtgtccggtt |
| 1431 | NM_198833 | SERPINB8 | catctatgctttgtagtatgactcctgtcactcagtacaattattttgag |
| 1432 | NM_201593 | CACNB2 | acagttcacactgattgtgacacattcttagtagctagtgtctgttctag |
| 1433 | R99527 | MGC39372 | gggtcaaaccatacatcgcttcgtctctgtagtgatgacttcctgtcctc |
| 1434 | T66903 | LOC54103 | gtccagtgtctccctttgcataacctgctgcattgcattgacagtggagt |
| 1435 | U37028 | ITGAD | gctgagcatcgataccgtgtgaataacctcagccagcgagatctggccat |
| 1436 | W56129 | SFRS9 | tactatggagatcaacagttactgtgactgagtcggcccattctgtttag |
| 1437 | X58529 | IGHM | gagagggtttattacgattttgggagtggtcgattatgtactactttgac |
| 1438 | AA188785 | LOC286025 | gggaaggaggactccggtcttaactcccacgctaactttagctcaagtgg |
| 1439 | AA347638 | BCR | ttccatggagacgcagatggctcgttcggaacaccacctggatacggctg |
| 1440 | AA601122 | SECTM1 | gcgtttgtgtctcgggttaaaataaggttccgtccgcgtgctgggtcaga |
| 1441 | AA642467 | SLC2A14 | tggtcttggctttggtccacttgctgaacattttggcttcaggaagcagt |
| 1442 | AA682722 | LARP | agaatacctcggcaaattccgacgtcttgaagacttccgagtagatcccc |
| 1443 | AA757235 | LOC399933 | cttttggagtagtgtattctatgggtccagtccctttcatgcagccatta |
| 1444 | AA765313 | FZD3 | gatagctgtaactcacagttaacatgctttcagtcaagtacagattgtgt |
| 1445 | AB002310 | HUWE1 | gttaaaccagatcctacggcagtccacgacccaccttgctgatgggcctt |
| 1446 | AB002333 | ZNF518 | taaagaaagccatacatagaatgcttcaagctatcttgctatgcacatta |
| 1447 | AB024402 | ING1 | agaaatgtctcgctgatgcgggagatcgacgcgaaataccaagagatcct |
| 1448 | AB028952 | SYNPO | ggtttgggacttaccggggtgatgttagatctggaacccccaagtgaggc |
| 1449 | AB032991 | NDFIP2 | cactcgacaggttgacaacctagacagctcccccggacttgccttacttt |
| 1450 | AF008915 | EVI5 | aggtcattccacatcagtttgatggtgtcccagacaagctaatccaagca |
| 1451 | AF108138 | C15orf20 | gcacccatattttaagctgctttttcaggggataaatagtgtttggggac |
| 1452 | AF116668 | LMO2 | ttaggggatggtagacctttattgggtatcaagacatagcatccaagtgg |
| 1453 | AF143327 | FLJ32810 | attttaggactctaccgaataggaggagtgaactccaaagttcaaaaact |
| 1454 | AF200348 | D2S448 | cgctgctcgaagcagctgtatagcctgtgactctccgtgtgtcagctcct |
| 1455 | AF245480 | MONDOA | tgccgtatctgctgcagacatgattgtttcttgttctagaggttttcttg |
| 1456 | AI075159 | SPTA1 | gacaaagcttggagactatgccaacctaaaacaattctaccgagaccttg |
| 1457 | BU948323 | TCF4 | gtttatacaactgtcagtccacccagtggtgcaactggttctgattcagt |
| 1458 | AI675029 | C7 | tgatgctgagagcagcaaatgtgtctgccgagaagcatcggagtgcgagg |
| 1459 | AI694012 | PSMA5 | tgttagtgttaggctattaacaatagttaggtgaaaggtaatgagggcat |
| 1460 | AI732248 | COL4A1 | acgcttacagcttttggctcgccaccatagagaggagcgagatgttcaag |
| 1461 | AJ007509 | HNRPUL1 | tcatggataagatgcgggtgatgggcctacgccggcagcggaactatgct |
| 1462 | AK022224 | ACTN1 | tgtttcccgctgtgtgtatagcgtcatgccctatgcattcccacagactc |
| 1463 | AK023928 | PSCD1 | cataagttgcttgaaagtcgagaatggcagacatagggttgtggtgttgc |
| 1464 | AK024580 | NRP1 | atcatagacgagacagtccattcatcttagttaaattggattgagaatgc |
| 1465 | AK025005 | MARCH1 | attgtctgcagtagttaaatggcacattgtactccacgattttccaaatg |
| 1466 | AK091853 | COL3A1 | gggaaacatgcataagtgccaatcctttgaatgttccacggaaacactgg |
| 1467 | AK126650 | CAPZB | ctctgtttcatgctaaccagacacgccgtgcactcgttagattcctttct |
| 1468 | AK127124 | ARHGEF4 | aaaagcaaagatgccggaagccccaaaaagcccaccctagtgagtctgcc |
| 1469 | AK127132 | DRG1 | caacccagtcctccttaccttgcacctattaacgttggttcaacatgaag |
| 1470 | AK129940 | GNAI1 | agtctttcagtacacgttactggtaagtagtttccaagttacgtgttgtc |
| 1471 | AL049313 | CLIC5 | agtctcactacttctgacactctggttattgggcactaagggccagactg |
| 1472 | AL049327 | CBLB | cactctagttcaaatccacattctagttgaatccctgcaatgtaacttga |
| 1473 | AL049449 | GAB1 | cagtgatgtgctaatacactgatcaggtttagacaatgagctttggttgt |
| 1474 | AL050391 | CASP4 | taatcaacttcaaggagcaccttcattagtacagcttgcatatttaacat |
| 1475 | AL137527 | LRCH3 | aaacatattgagtaccggttgaaagtgtctctaccttgtgatctcggagc |
| 1476 | AL353942 | SEPT11 | tgtgctttcgcctttgcatgtaagtacggtagtaagaaacctttgagatc |
| 1477 | AL833915 | TDRD9 | cccgagcacgacatggagcttgcgtttgacgttcaattcagcgtggagga |
| 1478 | AL834278 | USP30 | agcttgaactgtacggtccgtcctgcactcacccgatgcagaccttgact |
| 1479 | AU252485 | MAP7 | gacacggaccttcatggaagtccttgctctgcgtggcatctgtcagcttt |
| 1480 | AV650179 | PRG1 | ggccccttgccgattttctatacccccccacaaatccctctttttacaat |
| 1481 | AV686223 | KIAA1407 | caagtctggtgaacgaatgagccagattagtgtaatatttaggacaggaa |
| 1482 | AW014009 | MAP2K3 | tctagattagtctccaccgccgtccaggacccacttgcagcatggagtcg |
| 1483 | AW190768 | SLC13A3 | gaagttctagaaaccgcagctgacatctcgacccaagagatttaggattc |
| 1484 | AW292143 | GFAP | aactgaggcacgagcaaagtgaagacactggctcatattcctgcagcctg |
| 1485 | AW439398 | CCND1 | aacacggctcacgcttacctcaaccatcctggctgcggcgtctgtctgaa |
| 1486 | AW452039 | HRMT1L3 | gatcctcatggtctgccacgtaatcattttcttagacgtttgctccacca |
| 1487 | AW615076 | LOC492304 | acgcagactgagcatagacagagcgcagacaatcacaaagcagaaaagca |
| 1488 | AW664012 | ALOX5 | ctgatttttaagacttagaataaggaggtggggaatgtgaaatatctcat |
| 1489 | AW967479 | CD38 | gagaaccgcgacgagcaccacataagccgtaggaccgcatgaaagaagag |
| 1490 | AW970654 | PHTF2 | atgagaacttatcatgttggtgtgttaggtaaatcgggcaaatatgatag |
| 1491 | BC028066 | NALP1 | accttggcaagatatttacccaccggccatctctgtttactcatgaatgt |
| 1492 | BC034289 | LOC87769 | caacttaatggcagactgtgatcgctaactgcatctggcacaaaaacatg |
| 1493 | BC042366 | PCDH9 | cttctcatatgatagcttatgatgccggaattctgtaaacaataaagatg |
| 1494 | BC045532 | LSM8 | tagtcacattagtacataggtgtcctttgcaactgctgtcaactctacat |
| 1495 | BC050383 | TMPO | caaaagacaagttgaagagtgagttggtcgccaacaatgtgacgctgccg |
| 1496 | BC050602 | HIST1H2AC | tccctatgagaacatacagagcttcctgtacacagttgcatgtactgcat |
| 1497 | BC058855 | VEGF | ttaaacgaacgtacttgcagatgtgacaagccgaggcggtgagccgggca |
| 1498 | BE147267 | ECE1 | tgatggctatagcagaatgaggtcgggtcaggaccctcaaacaccatctg |
| 1499 | BE549606 | BZW1 | ttcaagactgtattattcaaggcttaactgaaaccggtactgatttggaa |
| 1500 | BE798965 | LAMC1 | tttcattaagtggctacatcctaacatatgcattggtcaaggttgcagca |
| 1501 | BE927772 | SFRS3 | ggtacctaagtcttgtcatggacttacaggtttgcatgggttccaaatac |
| 1502 | BF055235 | RIPK1 | caggccaattccaagtcatatgcctagtctgcataatatcccagtgcctg |
| 1503 | BF513638 | WNT3 | ctagggtctgataggaacagacctgaggcttatctttgcacatgttaaag |
| 1504 | BG682263 | HDAC3 | ctatagtgaatacttcgagtactttgccccagacttcacacttcatccag |
| 1505 | BG683220 | PMS2 | tgttcagctgccccctagtgactccgtgtgtgaagagtacggtttgagct |
| 1506 | BG747999 | MT1L | aaattccgataaagccgaggttaaccggcattaaagaacgcgggaaaaag |
| 1507 | BI493513 | PHF8 | gtgttagtaatcaaggtttagaacaccatgagatagttacccctgatctc |
| 1508 | BI559738 | GPR56 | gattacatcttctctatggcaagcgtgacttcttgctgagtgacaaagcc |
| 1509 | BM709325 | BCL7A | tatgtaacgatataagctatcggagggtgaaccgatcaggaacgctttt |
| 1510 | BM711190 | MED28 | ctttgggagggtattttgctctcgttagttttgtgggcagcctcagattc |
| 1511 | BM727177 | GOLT1B | cactgtatctctggaagtgatgcatgaattcgattggattgtgtcatttt |
| 1512 | BQ009245 | GPM6B | ctccttaatagggacctgtgactccttaataaggacctgtgacatgccca |
| 1513 | BQ021469 | AGPS | agttcagtactgtaggaggatgggtatctactcgcgcatcaggcatgaag |
| 1514 | BQ215285 | LEF1 | ggcgtaggagtaacctcgcactttgctagctaacctgactccgggtgagg |
| 1515 | BQ898221 | ITGA6 | attagaattagagcatgggagggtcatcactatgacctaaattatttact |
| 1516 | BU929213 | SESN3 | gctgtagatatagtctaaggtagttaaccatataagccttttcaactctt |
| 1517 | BU954396 | RPL11 | ttagccattgctgcaatctctgctgttgcctcctgttctgaaaaaattaa |
| 1518 | BX095432 | CNTN5 | gtgtaaagataaatgatctgcttattgatagtgtcatcgaatgagcatga |
| 1519 | BX640908 | EVI1 | gtagcatggctctttcatataggactatttacaagactgctgagcagaat |
| 1520 | BX648339 | USP53 | taatggttctactaatttggactcacctgttatcgatggaaatggtacag |
| 1521 | BX648365 | SEPT7 | atggagattaagatgccttgaattgtctagggtgttctgtacttagaaag |
| 1522 | BX649193 | TKT | atggtggcgtccctgaggtagtgtagggtggaagctatggtgcagcttgg |
| 1523 | C05886 | ETV6 | gcgtgactcatttcaacactaagtactaggggtgttgtcaggagacaaat |
| 1524 | D31762 | TRAM2 | catggatgctttaattggaagtgggttgccgacccccttgtgcctagaaa |
| 1525 | D86967 | EDEM1 | ggtgaaaaggtagggctgagtgattaccttagccacagggtggctgagca |
| 1526 | 1141942 | NPEPPS | aatggttaaacacaaaaggctgatagctggtatcacatagttggagtcag |
| 1527 | M60028 | HLA-DQB1 | cattcgaatactaaaatagtgggagtggtctttttcgtcatccctgcggc |
| 1528 | M77810 | GATA2 | tctcctctggcttccctctctgaaatagccgaactccaggctgggctgag |
| 1529 | N26272 | MSI2 | atttactaacatatgataggtattaagccactagggtcatgcctgacccc |
| 1530 | N28431 | COL6A1 | caccaaggaccgcctgggccggacgaatgcgagattttggacatcatcat |
| 1531 | N41620 | WWP1 | tgttcagaaaggtattaagggcttaggccaaatcttactttgagtatgtt |
| 1532 | N53163 | COL27A1 | catcagggaagcagtaccgcctggaagttggacctgcgtgcttcctctga |
| 1533 | N54946 | EWSR1 | ttcagtgtcttgtacaggtaaggcactcaatgttgttaacatgccctttt |
| 1534 | N70000 | UBE3B | tcaggtaaggcctcgccaagcctctatgcaccccacaaagtttctgcctc |
| 1535 | NM_000016 | ACADM | atgataaaactggtgaatatccagtccccctaattagaagagcctgggaa |
| 1536 | NM_000022 | ADA | gccttcgacgagcccaaagtagaactgcatgtccacctagacggatccat |
| 1537 | NM_000024 | ADRB2 | ttcccccactcctcttatttgctcacacggggtattttaggcagggattt |
| 1538 | NM_000033 | ABCD1 | tccctattcgtagccatctccgtggccaatgtgactaccgtgccagcagc |
| 1539 | NM_000062 | SERPING1 | gacagaggacccagatcttcaggtttctgcgatgcagcaccagacagtgc |
| 1540 | NM_000089 | COL1A2 | catgagtgtgatccacattgttaggtgctgacctagacagagatgaactg |
| 1541 | NM_000099 | CST3 | gaaaccctcaaataggccagaacaactcactaattaaattcatcccctcc |
| 1542 | NM_000110 | DPYD | cattaatattggtggattgcagcaatttgctactgaggtattcaaagcaa |
| 1543 | NM_000118 | ENG | aagtatgatcagcaatgaggcggtggtcaatatcctgtcgagctcatcac |
| 1544 | NM_000120 | EPHX1 | tattcctacatggttcgtgggggccactttgcggcctttgaggagccgga |
| 1545 | NM_000147 | FUCA1 | attttcagagcaatctaaaagcgccaaaattcgctatgtttacagtgata |
| 1546 | NM_000169 | GLA | ccggcaggagattggtggacctcgctcttataccatcgcagttgcttccc |
| 1547 | NM_000182 | HADHA | atttatcagagtaacgagaagacaaactccggcactgggtttgctccctg |
| 1548 | NM_000194 | HPRT1 | ttattcctcatggactaattatggacaggactgaacgtcttgctcgagat |
| 1549 | NM_000214 | JAG1 | gccccatctaggagagccttgattcccttgttattcaacagcaagtgtga |
| 1550 | NM_000234 | LIG1 | aagcagacgttctgcgaggttcccgacctggaccgaattatccccgtgct |
| 1551 | NM_000239 | LYZ | aaatgggagagtggttacaacacacgagctacaaactacaatgctggaga |
| 1552 | NM_000246 | MHC2TA | gtcagagcctcgagttattaacactaacgatttgttaatgatagctactg |
| 1553 | NM_000249 | MLH1 | caaagtgtaccaacataagtgttggtagcacttaagacttatacttgcct |
| 1554 | NM_000251 | MSH2 | cctctacctacgatggatttgggttagcatgggctatatcagaatacatt |
| 1555 | NM_000277 | PAH | accagacggtcgcaggcttagtccaattgcagagaactcgcttcccaggc |
| 1556 | NM_000305 | PON2 | agctgctcataggcactttataccacagagccttgtattgtgaactctaa |
| 1557 | NM_000341 | SLC3A1 | tgctgcttggtgaacaatcattaattcttcgatatttctgtagcttgaat |
| 1558 | NM_000361 | THBD | acaacaacaccagctatagcaggtgggcacggctcgacctcaatggggct |
| 1559 | NM_000382 | ALDH3A2 | gacagatggtggatggtctggacaagaagcgagtaagccactgcggttgg |
| 1560 | NM_000395 | CSF2RB | cccttgagaccccacgtcatgtagagaagttaacggcccaagtggtgggc |
| 1561 | NM_000417 | IL2RA | ataatctttgggtaacttcaaaacggggcagccaaacccatgaggcaatg |
| 1562 | NM_000418 | IL4R | gccagacccccaaaatcgtgaactttgtctccgtgggacccacatacatg |
| 1563 | NM_000435 | NOTCH3 | agtacacgacccaggtatgtaccaagtaggcacccttgggcgcacccact |
| 1564 | NM_000448 | RAG1 | acttatgagttggtttttgcaattgagtttccctctgggttgcattgagg |
| 1565 | NM_000484 | APP | cttccacataggaaagactttgacccaatgaggaattagtcattgtcctt |
| 1566 | NM_000485 | APRT | tgcttcttgttccttctgcgagctggtattgagcgcctgccacgagccag |
| 1567 | NM_000536 | RAG2 | atataccttcaagcaaccctttggattatgcccatgaacaagttagtttc |
| 1568 | NM_000545 | TCF1 | aacctggccttcagtgtaccgcgtctaccctgggattcaggaaaaggcct |
| 1569 | NM_000546 | TP53 | gggcagctggttaggtagagggagttgtcaagtcttgctggcccagccaa |
| 1570 | NM_000561 | GSTM1 | taagaagaactgtgcggcacagcgcccgctactacagctcgtcacacggt |
| 1571 | NM_000574 | DAF | aagtggaaccacttcaggtactacccgtcttctatctgggcacacgtgtt |
| 1572 | NM_000578 | SLC11A1 | cctcaggatttgcggagcctgtaataattgagggacaggcggggcgccat |
| 1573 | NM_000594 | TNF | gtgtctgtaatcgccctactattcagtggcgagaaataaagtttgcttag |
| 1574 | NM_000598 | IGFBP3 | gactttgtgacttaggcggctgtgttgcctatgtagagaacacgcttcac |
| 1575 | NM_000601 | HGF | ttgatcaactatgatggcctattacgagtggcacatctctatataatggg |
| 1576 | NM_000604 | FGFR1 | ggtggtgccagtggcttattaattccgatactagtttgctttgctgacca |
| 1577 | NM_000610 | CD44 | ttgtagtccctcacttggatatacctctgttttcacgatagaaataaggg |
| 1578 | NM_000628 | IL10RB | cactaaaataagatcatgttttaattgtgagaaacagggccgagcacagt |
| 1579 | NM_000629 | IFNAR1 | gatgttacagttcctaatttgaaaccactgactgtatattgtgtgaaagc |
| 1580 | NM_000640 | IL13RA2 | tatcaagagacatggtattgactcaacagtttccagtcatggccaaatgt |
| 1581 | NM_000660 | TGFB1 | ggataacacactgcaagtggacatcaacgggttcactaccggccgccgag |
| 1582 | NM_000700 | ANXA1 | gaactcgccataaggcattgatcaggattatggtttcccgttctgaaatt |
| 1583 | NM_000701 | ATP1A1 | agaacggcttcctcccaattcacctgttgggcctccgagtggactgggat |
| 1584 | NM_000717 | CA4 | agaaggtcgtctggactgtgttccgggagcccattcagcttcacagagaa |
| 1585 | NM_000729 | CCK | aaaggcactgccaaccccatttcacagaccgcaaaccgaggcgcgaggaa |
| 1586 | NM_000732 | CD3D | gtaaatgtggttgcattgtcaatagggacgctaaagttcaggccaccttt |
| 1587 | NM_000773 | CYP2E1 | atggacggtatcaccgtgactgtggccgacctgttctttgcggggacaga |
| 1588 | NM_000791 | DHFR | tcaggggttacctccatgtgccctttttagggaagctgttggagaaaata |
| 1589 | NM_000801 | FKBP1A | caccggacggagaacatgatgaacgacgcacatggcatagcaacgacgaa |
| 1590 | NM_000852 | GSTP1 | tggtgccggggcgacaaggtcgcaactataatctaaccgccttgctgctc |
| 159 | NM_000856 | GUCY1A3 | attagaagattttacaggacgagggctctacctctcagacatcccaattc |
| 1592 | NM_000867 | HTR2B | aactctcagaaaacgctccagtaagatctacttccggaatccaatggcag |
| 1593 | NM_000878 | IL2RB | tatctatacatccgtatcttttaatgatccgtgtgtaccatctttgtgat |
| 1594 | NM_000885 | ITGA4 | actgtagcaatacctttaaaatatgaggttaagctgactgttcatgggtt |
| 1595 | NM_000887 | ITGAX | ccaaaatgtcgtgcaccgattgttccatgcctcatatggggcccgtaggg |
| 1596 | NM_000905 | NPY | ttaaccttggtcagcactcggcacacccctgcgcggtgcacataacagca |
| 1597 | NM_000906 | NPR1 | tgaaacgtgtgaaccgtaaacgcattgagctgac&cgaaaagtcctgttt |
| 1598 | NM_000953 | PTGDR | acctccagccagaagtcccttccaaatataagagtactcatgtttattta |
| 1599 | NM_000960 | PTGIR | gtgggtgatgacgtaggacatgtgcttggtacaaaaagggcctgagacat |
| 1600 | NM_000964 | RARA | gggcaaatacactacgaacaacagctcagaacaacgtgtctctctggaca |
| 1601 | NM_000967 | RPL3 | tgataactgcaaaggggagcttggaattatgttagtcagtccctgtgaat |
| 1602 | NM_000968 | RPL4 | gggcttttcaagattctgctaagatctgtattaatcatcttgtgcatggg |
| 1603 | NM_000969 | RPL5 | ttctgccacatcacgcagagctagtgatcgagtttgcacaattacaccaa |
| 1604 | NM_000970 | RPL6 | gtgaaccctccacggtggaaaaaatgccgcccttagtcgggtggggaaaa |
| 1605 | NM_000972 | RPL7A | gctggcttaacctatgagaagttctatctgacgatcagcttggaacagcc |
| 1606 | NM_001001547 | CD36 | gtatgcacgtacaaatttcttaacctgttatcaatgtctgagctacataa |
| 1607 | NM_001005 | RPS3 | gcgtatcagaggtagcggagaatgaagagcgacaagtgggacgagctgta |
| 1608 | NM_001009 | RPS5 | aggaagacgagacgactagaagcacacaataagacgacaaccagacacaa |
| 1609 | NM_001015 | RPS11 | tagcccatatattcatgtgtcatcgttcaggaacaagtcagtgacaaact |
| 1610 | NM_001019 | RPS15A | cgcacatttgcatactatatgcttgttacagtgatccccacagtaactca |
| 1611 | NM_001069 | TUBB2 | caatactttaattgtaagaggagttccacatcattacatcaacagtgtga |
| 1612 | NM_001079 | ZAP70 | agtaacggtgccacgtggataccaatgcacacgcccctagagtccaccct |
| 1613 | NM_001092 | ABR | tctgctgatacacaggtaggatgggacccttcatgaatatctgactttaa |
| 1614 | NM_001130 | AES | aatgctgtatcaagggtgggcttagctgtgcctttccaataaagatgtga |
| 1615 | NM_001150 | ANPEP | tggtgaaggacagccagtatgagatggacagcgagttcgagggggagttg |
| 1616 | NM_001165 | BIRC3 | ccttgatgagaagttcctaccactgtgcaatgaataacgaaaatgccaga |
| 1617 | NM_001175 | ARHGDIB | tctcccccaactgatatgttcatagaatgacagtttgtagatagaagatc |
| 1618 | NM_001178 | ARNTL | gcaaaactctctcattgaaagcgttcacatagttcctaatgtttctttat |
| 1619 | NM_001207 | BTF3 | tattctttggttctgctcccccactattgaccaatgtatgagatgggaag |
| 1620 | NM_001211 | BUB1B | tgtattgtttggcaccaatatataaactgcttcacccttcaggatcttct |
| 1621 | NM_001219 | CALU | tgagaagaattatcgtattccacgtttttagccctcaggttaccaagata |
| 1622 | NM_001226 | CASP6 | gatagagacaatcttacccgcaggttttcagatctaggatttgaagtgaa |
| 1623 | NM_001228 | CASP8 | ggaggagttgtgtggggtaatgacaatctcggactctccaagagaacagg |
| 1624 | NM_001229 | CASP9 | accagtatcgctcatagatcagcaaaccggggcctactagagtctgaaca |
| 1625 | NM_001237 | CCNA2 | gactggatataccctggaaagtcttaagccttgtctcatggaccttcacc |
| 1626 | NM_001239 | CCNH | ttgaactaaatatccagcagatacaacaagtagtcagaagttcaaagatg |
| 1627 | NM_001255 | CDC20 | cgcaaagaggcaagcgcaagacgacaggaaacgaagcgagagacgagaag |
| 1628 | NM_001256 | CDC27 | tcccataaacaaatgtaatgggcatattgggactcgtatgtaggaatcaa |
| 1629 | NM_001265 | CDX2 | ttaaagccttctggatccatggggggagaagtgatatggtgaagggaagt |
| 1630 | NM_001266 | CES1 | ggaggagcaaagactggggtcttttgcgaaagggattgcaggttcagaag |
| 1631 | NM_001273 | CHD4 | aggatgcttttactacccagtggcttgtaagagacctgcgaggcaaatca |
| 1632 | NM_001274 | CHEK1 | atattggttgacttccggctttctaagggtgatggattggagttcaagag |
| 1633 | NM_001280 | CIRBP | gtgcgccccacagtagacgtgcagacgtccctgagaggttcttgaagatg |
| 1634 | NM_001295 | CCR1 | ggaacatagaactcatgacggaagagttgagacctaacgagaaatagaaa |
| 1635 | NM_001312 | CRIP2 | agtgttatttatgctcccttcgtgggtgatggccacgccctcaccatgtc |
| 1636 | NM_001313 | CRMP1 | ataaggatgtctaccaaatgtccgacagccagctctatgaagcctttacc |
| 1637 | NM_001337 | CX3CR1 | agcactcccaagtctacagagtgatagccttccgtaacccaactctcctg |
| 1638 | NM_001344 | DAD1 | gaccggagtaccttgcgtgcagttatgtcggcgtcggtagtgtctgtcat |
| 1639 | NM_001345 | DGKA | gaccgggctgcattgtgtatggtgccacctagagatccacgatgactgcc |
| 1640 | NM_001398 | ECH1 | ctgcagacccaagacctcgtgaagtcggtccaggccacgactgagaacaa |
| 1641 | NM_001404 | EEF1G | attggaccgacataggaccgtccggatgcaactctccccgtacaaccctg |
| 1642 | NM_001428 | ENO1 | aagtgtctagagtcatgtgagcctcgtgtcatctccggggtggccacagg |
| 1643 | NM_001436 | FBL | ctaggaccctcacgaacggacaacacagaagcgcaacgcgcaacacacaa |
| 1644 | NM_001441 | FAAH | gcagcccatgggtatgacataggccaaggcccaactaacagtcaagaaac |
| 1645 | NM_001456 | FLNA | aggcaacctgacggagacctacgttcaggaccgtggcgatggcatgtaca |
| 1646 | NM_001459 | FLT3LG | ccgtgagctgtctgactacctgcttcaagattacccagtcaccgtggcct |
| 1647 | NM_001462 | EPRL1 | tgtaatggtctctgaaaaggaattgagaagtaattcctctgattctgttt |
| 1648 | NM_001489 | NR6A1 | tcacagatgccttctctaagacagctcctgtgtacagcatcgttctttgc |
| 1649 | NM_001513 | GSTZ1 | ctacgagacggtgcccatcaatctcataaaggatgggggccaacagtttt |
| 1650 | NM_001515 | GTF2H2 | tataatggagaaagattttgttatggatgtcagggggaattgaaagacca |
| 1651 | NM_001540 | HSPB1 | tttaccctcgcgcgctgattatccaccctgggcgagggataccgatgtgt |
| 1652 | NM_001560 | IL13RA1 | taccagtcccgacactaactatactctctactattggcacagaagcctgg |
| 1653 | NM_001607 | ACAA1 | atgggagccgctgccgtctttgaataccctgggaactgagtgaggtccca |
| 1654 | NM_001630 | ANXA8 | gaaacatcgtttcaaggagcgagattgacttaaatcttatcaaatgtcac |
| 1655 | NM_001640 | APEH | ctgagatgctggacaaatcgcccatcagatacatccctcaggtgaagaca |
| 1656 | NM_001654 | ARAF | gacgtctatgcctacggggttgtgctctacgagcttatgactggctcact |
| 1657 | NM_001664 | RHOA | cccaccccagagctatgccaacaaaatctgttacggagtaaagccctgaa |
| 1658 | NM_001700 | AZU1 | ggctgagaaacagtagctatcaaacgccggctgtgagccacgtctgtgct |
| 1659 | NM_001712 | CEACAM1 | aggaggattagcttggagttctctatactcaggtacctctttcagggttt |
| 1660 | NM_001715 | BLK | caccttactggggcttagtactccggatgaccgtgcgaggtcactgttac |
| 1661 | NM_001716 | BLR1 | ataagctatagacccgaggaaactcagagtcggaacggagaaaggtggac |
| 1662 | NM_001728 | BSG | cactcccagtgcttgcaagattccaagttctcacctcttaaagaaaaccc |
| 1663 | NM_001734 | C1S | aatttagctatagtctagaaagttagtcgaagttaactagggagggtgtg |
| 1664 | NM_001743 | CALM2 | actattgcaaaacgggtgtattatccaggtactcgtacactatttttttg |
| 1665 | NM_001747 | CAPG | agactgcagaggaatgacgaaagcgacgggccagttgacgacgcgaagag |
| 1666 | NM_001752 | CAT | caggaaagtacccctcctggactttttacatccaggtcatgacatttaat |
| 1667 | NM_001753 | CAV1 | cgctttattggctgagatatgaacatattgttgaaaggtaatttgagaga |
| 1668 | NM_001759 | CCND2 | cagcagtaccgtcaggaccaacgtgacggatccaagtcggaggatgaact |
| 1669 | NM_001767 | CD2 | agccacacatctccataaagatgtaagaggtaattatttcagctgggtgc |
| 1670 | NM_001772 | CD33 | caatgcatatcattcagacataaagatgggccgaagtacagatacatgct |
| 1671 | NM_001774 | CD37 | tcttctgtgtggtgagtggaccgcttaccccactaggtgaagatgtcagc |
| 1672 | NM_001776 | ENTPD1 | attcaacaatctaaccatactgagctgctgattccccagggattgcatat |
| 1673 | NM_001783 | CD79A | ctaggtcgcacagggcatagacgatagtaccattcctggttgaaacacga |
| 1674 | NM_001786 | CDC2 | tctccagaagtattgctggggtcagctcgttactcaactccagttgacat |
| 1675 | NM_001793 | CDH3 | atgacgtggcaccaaccatcatcccgacacccatgtaccgtcctaggcca |
| 1676 | NM_001794 | CDH4 | acttggtgctatgagccctccaagtattaaccttacacagagcccccgct |
| 1677 | NM_001795 | CDH5 | ctgcatgacggagccgagccatgtgtctttacacctcgctgttgtcacat |
| 1678 | NM_001798 | CDK2 | agccttcctacacgttagatttgccgtaccaatctctgaatgccccataa |
| 1679 | NM_001830 | CLCN4 | ttaggtccaccatacgatctgtgtaagtaagattatcccacttgcccttt |
| 1680 | NM_001838 | CCR7 | tgcaaggggcgtgggagtggcctgaagagtcctctgaatgaaccttctgg |
| 1681 | NM_001839 | CNN3 | gtatcaatgtagagttgctctgttttcttcaactgtatttattgctgcat |
| 1682 | NM_001897 | CSPG4 | actggctaggggtgtcaatgcatcagccgtagtgaacgtcactgtgaggg |
| 1683 | NM_001901 | CTGF | tgagagtgtgaccaaaagttacatgtttgcacctttctagttgaaaataa |
| 1684 | NM_001905 | CTPS | ttactttcttaatgtgacctagcaataggcatagctacgtggcactatat |
| 1685 | NM_001908 | CTSB | cttaacaaaggttaccataagccacaaattcataaccacttatccttcca |
| 1686 | NM_001916 | CYC1 | aacacgacagccaacgtgcataagcatgcaacactaccgaggtagccaca |
| 1687 | NM_001923 | DDB1 | gcaaacctacagtatgacgatggcagcggtatgaagcgagaggccactgc |
| 1688 | NM_001928 | DF | agtagtgattagtcgtatttcgcgacacctcacacggtagatgtgatcaa |
| 1689 | NM_001939 | DRP2 | ctcttgatggagccagatccccatcctatagttcatagtcctctcctggt |
| 1690 | NM_001941 | DSC3 | gaatataccattcctattactgtaaaagacagggccggccaagctgcaac |
| 1691 | NM_001952 | E2F6 | ccaaggggttttacttaggacaagttgtaccttgccctctctccagctct |
| 1692 | NM_001964 | EGRL | taaacacattgaatgcgctttattgcccatgggatatgtggtgtatatcc |
| 1693 | NM_001993 | F3 | gattatatattccgcacttaaggattaaccaggtcgtccaagcaaaaaca |
| 1694 | NM_001999 | FBN2 | atgtgctattaagagcacgtatccattattcttctcaacccaagaacctg |
| 1695 | NM_002015 | FOXO1A | acccgagtttagtaacagtgcagattccacgttcttgttccgatactctg |
| 1696 | NM_002017 | FLI1 | gaaagcaaagcactggtacagttatttaacaggcatacacaagcagggaa |
| 1697 | NM_002023 | FMOD | tacccgtatgagacctacgagccttacccctatggggtggatgaagggcc |
| 1698 | NM_002033 | FUT4 | ctcctagttccacgtgctatcattctactaactggcaccctaaggttgaa |
| 1699 | NM_002046 | GAPD | aaaagcccctttggtgtgaaaaacggcccccacaagtttataaaaggggg |
| 1700 | NM_002049 | GATA1 | ccaagaagcgcctgattgtcagtaaacgggcaggtactcagtgcaccaac |
| 1701 | NM_002064 | GLRX | cttctggcgtaaaaacattctcgagttaataatgttaccccttataacag |
| 1702 | NM_002065 | GLUL | aagtcaaataactcctcattgtaaacaaactgtgtaactgcccaaagcag |
| 1703 | NM_002067 | GNA11 | ttattgacgcccagcgcgcctcgcctcttcacccatcaacgctgtgcttt |
| 1704 | NM_002068 | GNA15 | ggagcatggactttggaaccagaattctaggtgcgagtctcagctgtgtg |
| 1705 | NM_002076 | GNS | tcttacagttgatgcaaagtatcaactactttaccctaccttctcccctt |
| 1706 | NM_002086 | GRB2 | ttaatcctttaactctgcggatagcatttggtaggtagtgattaactgtg |
| 1707 | NM_002090 | CXCL3 | gatgttcttgaggtgaattccctgcagtgtctgcaagcactggcagcgca |
| 1708 | NM_002094 | GSPT1 | cttagtgactagttttcgctagacagcaggttaatacctagatctcattt |
| 1709 | NM_002102 | GYPE | gaagtgggatttacccattaccatatattcaccaccaggtcactgacgag |
| 1710 | NM_002107 | H3F3A | gcgaggacggggctttgtagaatgctcgctggtggtagctgttgttcctc |
| 1711 | NM_002108 | HAL | ggtgcgctctgttgtaaggccctggataaaagatcgcttcatggccccgg |
| 1712 | NM_002110 | HCK | caatccacaatctgacattctcaggaagcccccaagttgatatttctatt |
| 1713 | NM_002118 | HLA-DMB | cacatgggagatctagatgtagaaggtacacaagtagtaggataactcac |
| 1714 | NM_002121 | HLA-DPB1 | cagactgcaaatctgcctgataggacccatattcccacagcactaattca |
| 1715 | NM_002128 | HMGB1 | ctgtgcaaaggttgagagctattgctgattagttaccacagttctgatga |
| 1716 | NM_002129 | HMGB2 | ggtagcacagcaaacttgtaggaattagtatcaatagtaaattttgggtt |
| 1717 | NM_002135 | NR4A1 | ttggggccctagtggtggggctacaaggcttgctcctagatctactccaa |
| 1718 | NM_002141 | HOXA4 | tgtcagcgccgttaaccccagttataacggaggggagcctaagcgctctc |
| 1719 | NM_002145 | HOXB2 | tccttccaatgaaatctcaggaataattaaactctagggggactttctta |
| 1720 | NM_002162 | ICAM3 | aagaagctgcgtccgtcgtcactctcggtagcatttagctgaagttgagc |
| 1721 | NM_002166 | ID2 | ttggacctgcagatcgccctggactcgcatcccactattgtcagcctgca |
| 1722 | NM_002167 | ID3 | ctatagaggccgattatcgaagccggtacgtaaagacagcgcaagaagag |
| 1723 | NM_002186 | IL9R | gaacctgtcgtgcaaagctcacgtcaccaactgctgcagttatctcctga |
| 1724 | NM_002193 | INHBB | cacgtgaactatgcaatttaaagggttgacccacactagacgaaactgga |
| 1725 | NM_002198 | IRF1 | taaatgaatctcgttcccaaagaactacccccttttcagctgagccctgg |
| 1726 | NM_002199 | IRF2 | ctgaaacctatcgaataatcgggccgagccgcagagcacaagggaaccag |
| 1727 | NM_002222 | ITPR1 | agggaactttctatgcaatgttcaggataaatcgatactgctggccaatc |
| 1728 | NM_002224 | ITPR3 | attgtgctggtccgcgtgaagaacaagaccgactacacgggccctgagag |
| 1729 | NM_002228 | JUN | ttgcggccccgaaacttgtgcgcgcagcccaaactaacctcacgtgaagt |
| 1730 | NM_002229 | JUNB | tacacgactacaaactcctgaaaccgagcctggcggtcaacctggccgac |
| 1731 | NM_002230 | JUP | gccagtgatagtagttaccttgcagggtcgttgtcaggttatgtgagaaa |
| 1732 | NM_002248 | KCNN1 | aagacccagaccgtcatgtacgaccttgtatcggagctgcacgctcagca |
| 1733 | NM_002276 | KRT19 | acaggaagatcactacaacaatttgtctgctccaaggtctctgaggcagc |
| 1734 | NM_002295 | LAMR1 | gtaggtaggttaacataagatgcctccgtgagaggctggtggtcagccct |
| 1735 | NM_002312 | LIG4 | catattgaaatgtacggaatttgatccatgcgatactatgtgtgcattat |
| 1736 | NM_002341 | LTB | ggcagcatgagtggttaagagtcaagggagtagccggggtagtggcttac |
| 1737 | NM_002349 | LY75 | ttgtaaaacgtgatggatttccactatgggttgggctctcaagtcatgat |
| 1738 | NM_002351 | SH2D1A | tccccgtgtgtaggtagatctggtctttagaggcagatagataggtcagt |
| 1739 | NM_002353 | TACSTD2 | tgttaactgggcctatgtagtagcctcatttaccatcgtttgtattactg |
| 1740 | NM_002356 | MARCKS | taggaacttttcacttatctcatgttagctgtaccagtcagtgattaagt |
| 1741 | NM_002379 | MATN1 | gaagaagttcatcagtcagatcgtggatacgctggacgtgtcagacaagc |
| 1742 | NM_002388 | MCM3 | gctgccaaccctgtctacggcaggtatgaccagtataagactccaatgga |
| 1743 | NM_002390 | ADAM11 | ccacatgtcccagatcgtctccaattcgaaaacaaccgtcctgctgtccc |
| 1744 | NM_002392 | MDM2 | aagttgaatctctcgactcagaagattatagccttagtgaagaaggacaa |
| 1745 | NM_002393 | MDM4 | tagtatgggtttctaatcctaggcttgtacaatggattggagttgagcca |
| 1746 | NM_002398 | MEIS1 | gcgcgcatggctgaaatcctaggcgagaagaaagattcttctgcctgata |
| 1747 | NM_002412 | MGMT | atgtttgagcgacacacacgtgtaacactgcatcggatgcggggcgtgga |
| 1748 | NM_002414 | CD99 | caaagagcccgcagcgatgaaacgagactgaggcggcgaacaaacagaaa |
| 1749 | NM_002415 | MIF | ttttccccgcaccccctaataatcgctcgccttatatgtcccccccgcac |
| 1750 | NM_002417 | MKI67 | tattggctgccatgatagggttctcacagcgtcatccatgatcgtaaggg |
| 1751 | NM_002419 | MAP3K11 | tatcagcatgccactcgacttcaagcaccgcatcaccgtgcaggcctcac |
| 1752 | NM_002421 | MMP1 | cgtgtgacagtaagctaacctttgatgctataactacgattcggggagaa |
| 1753 | NM_002422 | MMP3 | ttttatgttattacagggcattcaaatgggctgctgcttagcttgcacct |
| 1754 | NM_002436 | MPP1 | tctctgcagctatcctaattcagccagtaaggttcagtcttcttgctcag |
| 1755 | NM_002441 | MSH5 | ctcgtggcaaggaggtctcagacttgatccgcagtggaaaacccatcaag |
| 1756 | NM_002444 | MSN | tcctctccagctataacagtagggatgagtacccaaaagctcagccagcc |
| 1757 | NM_002447 | MST1R | gagatgaatgtgcgtccagaacagccgcagttctcacccatgccagggaa |
| 1758 | NM_002460 | IRF4 | catctgttctatgcttcctcgtgccaattatagtttgacagggccttaaa |
| 1759 | NM_002462 | MX1 | tcctgtcggagccctgtctcctctctctgtaataaactcatttctagcag |
| 1760 | NM_002466 | MYBL2 | ttagtggttgtgaatggtgcgtgtgagatctgcatcctggcgtcaggcct |
| 1761 | NM_002475 | MLC1SA | tcatgacacgcgcccaccctatgcgcgttttcacaaactccgaagaacgc |
| 1762 | NM_002483 | CEACAM6 | actcttggtattaccctcctaatagtcatactagtagtcatactccctgg |
| 1763 | NM_002512 | NME2 | ctgaacacgtgcggacaacgacacgcttcgcgcgctgttggatgtaacca |
| 1764 | NM_002514 | NOV | agggagataactgtgtgttcgatggggtcatctaccgcagtggagagaaa |
| 1765 | NM_002527 | NTF3 | aataaactcgtgggctggcggtggatacggatagacacgtcctgtgtgtg |
| 1766 | NM_002530 | NTRK3 | gaggtcattgagtgcattacccaaggtcgtgttttggagcggccccgagt |
| 1767 | NM_002572 | PAFAH1B2 | tcgccgtagacagcgctctggctaccaccgtgaggctacttgaactgtca |
| 1768 | NM_002576 | PAK1 | ccttctcatgctctgaggtactactgcctctgcagcacaaatttctattt |
| 1769 | NM_002585 | PBX1 | ctgcccaagcaaatgcattataatcataagtgatccagtatttcttctct |
| 1770 | NM_002592 | PCNA | gatatcattacactacgggccgaacgatcacgcggataccttggcgctag |
| 1771 | NM_002600 | PDE4B | gttcaggcgttcttctcctagacaactataccgatcgcattcaggtcctt |
| 1772 | NM_002608 | PDGFB | ttccctcgtccgtctgtctcgatgcctgattcggacggccaatggtgctt |
| 1773 | NM_002609 | PDGFRB | agtgggttctcaatacggtaccaaagatataatcacctaggtttacaaat |
| 1774 | NM_002616 | PER1 | atcaggacgcactttccggctccagtgacctgctcgaacttctgctgcaa |
| 1775 | NM_002619 | PF4 | gggaggtggtcttcacacacaggcactgcaggtccccatcttcttcagct |
| 1776 | NM_002621 | PFC | ttcatgtgtcattgactccgaccttcagttacccatgcttttagctgcca |
| 1777 | NM_002648 | PIM1 | ttctgctgaatgccgcgatgggtcaggtaggggggaaacaggttgggatg |
| 1778 | NM_002658 | PLAU | aatttcagtgtggccaaaagactctgaggccccgctttaagattattggg |
| 1779 | NM_002659 | PLAUR | ccatgaatcaatgtctggtagccaccggcactcacgaaccgaaaaaccaa |
| 1780 | NM_002687 | PNN | tccgacagaaagaggtctatatcagagagtagtcgatcaggcaaaagatc |
| 1781 | NM_002704 | PPBP | gaagtgatcgggaaaggaacccattgcaaccaagtcgaagtgatagccac |
| 1782 | NM_002729 | HHEX | taagtaacttgactataaaataaagccgtccgtgggacgactgacctcgt |
| 1783 | NM_002730 | PRKACA | gggcgattcaacctgtgtgctgcgaaggacgagacttcctcttgaacagt |
| 1784 | NM_002744 | PRKCZ | tgaccatctgtggtaaccgagaattccttggaggcagcgtcttcaccgcc |
| 1785 | NM_002753 | MAPK10 | atgcactggggtaccacatggtccatttcatgtgatctattactctgaca |
| 1786 | NM_002758 | MAP2K6 | gttggaaaagaatcatgggtctcaagatcaaatgaattggaatttgcatt |
| 1787 | NM_002791 | PSMA6 | agtgcttctaccaacatgtcccgtggttccagcgccggttttgaccgcca |
| 1788 | NM_002800 | PSMB9 | aatatcagctataaatatcgagaggacttgtctgcacatctcatggtagc |
| 1789 | NM_002814 | PSMD10 | ggattctgtaatgttcctccatacagttaaaacatcctaacttgtttttc |
| 1790 | NM_002827 | PTPN1 | ttgcttacttcccccttctaaacaacaatcccaacccttacgccatggtg |
| 1791 | NM_002831 | PTPN6 | cacaacctgaacctaggagtgccccattcttttgtaatttaaatggctgc |
| 1792 | NM_002835 | PTPN12 | ccacaggaattaagttcagatctaaatgtcggtgatacttcccagaattc |
| 1793 | NM_002844 | PTPRK | agaaccagattgaaatgagaacgtattggtgtttgtacagtgaacatgcc |
| 1794 | NM_002856 | PVRL2 | ctagggttccagactggttggacttgttcgtctggacgacactggagtgg |
| 1795 | NM_002868 | RAB5B | ccaacataacaatcgtggtaacagaatgcgactgctgatttaccgatgta |
| 1796 | NM_002870 | RAB13 | aggttttagggtcctgcaaaaggctagctcggcactacactagggaattt |
| 1797 | NM_002880 | RAF1 | ttgagctgctccaacactctctaccgaagatcaaccggagcgcttccgag |
| 1798 | NM_002887 | RARS | agcagatatgattatctatgttgtggacaatggacaatctgtgcacttcc |
| 1799 | NM_002893 | RBBP7 | gcactttcaagtgagctgttgcgtactgtatcatattgtagctattaggg |
| 1800 | NM_002901 | RCN1 | catgtttgtcggaagccaagctaccaattacggggaagatctcacaaaaa |
| 1801 | NM_002908 | REL | tgtgcagataacagcatgataaatgagtcgggaccatcaaacagtactaa |
| 1802 | NM_002913 | RFC1 | agcagtaggcttatgtacacctcttatagaggttgataggactgcttggg |
| 1803 | NM_002934 | RNASE2 | agtaacaaaactcgcaaaaattgtcaccacagtggaagccaggtgccttt |
| 1804 | NM_002935 | RNASE3 | gacactatagagtgtgtcataaccgagaccggataggggagtagttactt |
| 1805 | NM_002936 | RNASEH1 | tgtctgtcaaggaaggtgagtggtgaagggtttttacatatatacaagaa |
| 1806 | NM_002953 | RPS6KA1 | gaactcattctatccccaatcagctccttttccgttctgttctgctggga |
| 1807 | NM_002960 | S100A3 | ccccgactgagtttcgggaatgtgactacaacaaattcatgagtgttctg |
| 1808 | NM_002961 | S100A4 | atgactgctgtccgcgactactcgcgttctgatgacacgtctactaaaac |
| 1809 | NM_002971 | SATB1 | gaggcgaggtggccttcccaatgcgcgttattcggggttattgaagaata |
| 1810 | NM_002972 | SBF1 | cttccgcatttctccggtcaaccgcatgtatgccatctgccgcagctacc |
| 1811 | NM_002975 | CLEC11A | ctgcgtgctgtgcgactgtttttcgatccgctaggtgtggctgcgactgt |
| 1812 | NM_002983 | CCL3 | tgcatcacgtgagtctgagtttcgttgtgggtatcaccactctctggcca |
| 1813 | NM_002984 | CCL4 | gtatttctccccgtccgggcgctgagtagtgtgggttatggtatgttccc |
| 1814 | NM_002985 | CCL5 | gcagtcgtctttgtcacccgaaagaaccgccaagtgtgtgccaacccaga |
| 1815 | NM_003002 | SDHD | aacgggcaatcgcctagaaacgatagagacagaacgcatgcgcgcaggcg |
| 1816 | NM_003005 | SELP | cacatgtcaattcatctgtgacgagggatattctttgtctggaccagaaa |
| 1817 | NM_003006 | SELPLG | tgcagtatcccaactgcaggtccagtgcaggcaataaatatgtgatggac |
| 1818 | NM_003009 | SEPW1 | caaccacggcagggaaaagcggagtacggaacgaccatcgagcacaacag |
| 1819 | NM_003025 | SH3GL1 | gctagcaatatcgtgtgttgcgcactcgtaaagtgtgttatttcaaccct |
| 1820 | NM_003038 | SLC1A4 | ttccagtctcctgtgaagccaaaagggaccaggaaccgtgcaaaggaaac |
| 1821 | NM_003039 | SLC2A5 | agttcccgccagggttctacacaccgtctgcaagtcagtcaagtggatca |
| 1822 | NM_003058 | SLC22A2 | gaatggggatcacaatggcctatgagatagtctgcctggtcaatgctgag |
| 1823 | NM_003072 | SMARCA4 | tctctcaacgctgtccaactgggcgtacgagtttgacaagtgggccccct |
| 1824 | NM_003073 | SMARCB1 | gatgcatcgctgcactcaccctccgtgctgattccgccttagttctccac |
| 1825 | NM_003100 | SNX2 | tgaatcaaagagtatgtctgctcccgtgatctttgatagatccagggaag |
| 1826 | NM_003113 | SP100 | cagacgtacacccgagtagaagggtttgtgcaggacatgcgtctcatctt |
| 1827 | NM_003118 | SPARC | caccagattggtgtgtcatttttagaccctttactaggcatttatagatg |
| 1828 | NM_003120 | SPI1 | ctacaaagtttggcccctcccaatggtaagagggacaccccccttccttg |
| 1829 | NM_003121 | SPIB | aatgccaatgacctagagacacgagaagtccatgtggaggcacacagcag |
| 1830 | NM_003123 | SPN | ctaggatcccacaccgtgacaggtggaaccataacaacgaactctccaga |
| 1831 | NM_003127 | SPTAN1 | agaaaatggtgcttcactaacccgcttccggtccagtcacaatcatcatg |
| 1832 | NM_003128 | SPTBN1 | agcatgtcacgatgttacaagaacgattccgggagtttgcccgagacacc |
| 1833 | NM_003133 | SRP9 | catgttgaacagcattttagcatggtaagttcccttagctatatgaattt |
| 1834 | NM_003159 | CDKL5 | gtaaaccaagctgcgctcctgacataccatgagaatgcggcactgacggg |
| 1835 | NM_003189 | TAL1 | tggccgtacttgtgatttcgatggtacgtgaccctctgctgaagacttgc |
| 1836 | NM_003200 | TCF3 | cagctggctggatgattgggactttaaaacgaccctctttcaggtggatt |
| 1837 | NM_003222 | TFAP2C | aagtggtatctgacacactctaaaccccgtgttcaaacgggggccttctg |
| 1838 | NM_003225 | TFF1 | cagagwzgtgtacagtggccccccgtgaaagacagaattgtggttttcct |
| 1839 | NM_003234 | TFRC | ggactgacatttagcgtagctaagtgaaaaggtcatagctgagattcctg |
| 1840 | NM_003262 | TLOC1 | tgaattctatccgtgaatcccttagaggtctgtgaattgtaggttaagaa |
| 1841 | NM_003288 | TPD52L2 | ctgcatcctgacccacgtgtttgtagatcctttcagctattggcgccctg |
| 1842 | NM_003302 | TRIP6 | ctttgattgatcactctccctgacatccacctgtatgactttgtcaccaa |
| 1843 | NM_003311 | PHLDA2 | tcttcacgcgcccaccgccgcaatcgatccccccttattaCcttcttacc |
| 1844 | NM_003315 | DNAJC7 | caaatgctaaactctactgtaatcggggtacggttaattccaagcttagg |
| 1845 | NM_003318 | TTK | gtactatatgacttacgggaaaacaccatttcagcagataattaatcaga |
| 1846 | NM_003352 | SUMO1 | gccgatctacagtcattcaccgggggtaggagagtcacacaagtacaacc |
| 1847 | NM_003361 | UMOD | tctgggaccagattccgaagtgggagtgtcatagatcaatcccgtgtcct |
| 1848 | NM_003383 | VLDLR | ttcagctttggatgtggttaccgagtatctgtaacccttgaatttctaga |
| 1849 | NM_003390 | WEE1 | gcatctatgccgatctatgccgatctaagttgagcatcagtatggtgacc |
| 1850 | NM_003395 | WNT9A | ccgccgtccctgtgttatagtacataagaacccttattctcctgtggttc |
| 1851 | NM_003403 | YY1 | agcactaggactctagcctgcatttaggaagacttgccattttgccaagt |
| 1852 | NM_003415 | ZNF268 | cctgtcacttccagcgaggcacacaaaactgaccgtagggatggccacca |
| 1853 | NM_003425 | ZNF45 | atggtttggtcgtaggatcagcagggctcgcacttcggtcagcaggaaaa |
| 1854 | NM_003427 | ZNF76 | agagtccgccacccaaacgaccccggatagcttacctttcggaggtgaag |
| 1855 | NM_003453 | ZNF198 | tacagagttgcttacaatgacggatatgatgagtgaagacgaggggaaaa |
| 1856 | NM_003467 | CXCR4 | ggagtgggttgatttcagcacctacagtgtacagtcttgtattaagttgt |
| 1857 | NM_003480 | MFAP5 | agaatatcttcacgaacttgaccctcctactccacattgcaacatttcca |
| 1858 | NM_003549 | HYAL3 | ggagggaaccttgggtaggtttgagcagggggtatagtgtctgctttgca |
| 1859 | NM_003582 | DYRK3 | atgaaggagaccagttggcctgcatgatggagcttctagggatgccacca |
| 1860 | NM_003627 | SLC43A1 | tcagtgctgtgttcgccttgcttcagcagccacttttcatggcgatggtg |
| 1861 | NM_003636 | KCNAB2 | gcagtttgggagccacaaaaagcgtagcggtgtgatttctagctcagcct |
| 1862 | NM_003645 | SLC27A2 | gaggaaattttgtaggaaatttgcatacccgtaaagggagacttttttaa |
| 1863 | NM_003692 | TMEFF1 | acagactttagtattctctatgtagtgccaagtaggcaaaagctcactca |
| 1864 | NM_003701 | TNFSF11 | actaatggtgtacgtcactaaaaccagcatcaaaatcccaagttctcata |
| 1865 | NM_003707 | RUVBL1 | tgccatgttaaatatccctatctgtcggacacctgtatacatataagttt |
| 1866 | NM_003739 | AIKR1C3 | atttcacacaagacttctcccgccgtattggttgcggaccttgcgcggcc |
| 1867 | NM_003746 | DNCL1 | gataaaacgccgaacggaacacgaactgcgacactgaaagaacccacccg |
| 1868 | NM_003753 | EIF3S7 | tgtccgttgtgagcacgatggcgtcatgactggagccaacggggaagtgt |
| 1869 | NM_003801 | GPAA1 | ttctggaatgtgctcttctggaagtgagatctgcctgtccgggctgggac |
| 1870 | NM_003805 | CRADD | tggtagatctaaataccataaatggtggctagctttataggaaaacccat |
| 1871 | NM_003821 | RIPK2 | ccatatgatatacctcaccgagcacgtatgatctctctaatagaaagtgg |
| 1872 | NM_003824 | FADD | gatttcctgtagtgaatcaggcaccggagtgcaggttcgggggtggaatc |
| 1873 | NM_003842 | TNFRSF10B | acattgtaagatccatctacacagtcgttgtccgacttcacttgatacta |
| 1874 | NM_003852 | TIF1 | gtaggttagatgctattaagaaggcacttaatagtacatcatgtaagatg |
| 1875 | NM_003874 | CD84 | tagactcatctagcaccaactaccattagcactatgttaggagctgcaag |
| 1876 | NM_003877 | SOCS2 | agaggactgaccatattaaagagttagggctactaacctcaaaaagtttc |
| 1877 | NM_003879 | CFLAR | gagcaagcccctaggaatctgcctgataatcgattgcattggcaatgaga |
| 1878 | NM_003884 | PCAF | ggtcataaccccctaaaatccatcatgcaaccttattaatctgtcttggg |
| 1879 | NM_003900 | SQSTM1 | cacatgtgaactttttctaggtggcaggacaaatcgcgcccatttagagg |
| 1880 | NM_003902 | FUBP1 | ttcgtggcactccacaacagatagactatgctcggcaactcatagaagaa |
| 1881 | NM_003914 | CCNA1 | tgagtgagcttcataaagcgtaccttgatataccccatcgacctcagcaa |
| 1882 | NM_003954 | MAP3K14 | cacgtagcattaaatcagctgtgaatcgtcagggggtgtctgctagcctc |
| 1883 | NM_003955 | SOCS3 | tgtcagcccagtaagtattggccagtcaggcgcctcgtggtcagagcaga |
| 1884 | NM_003974 | DOK2 | ctggccctacaggtttctgcggcgctttgggcgggacaaggtaacctttt |
| 1885 | NM_003998 | NFKB1 | cgcaaactcagctttaccgagtctctgaccagtggtgcctcactgctaac |
| 1886 | NM_004039 | ANXA2 | agacagacgagacacgacagaccggaacgcacgaccaccgaacaagcaac |
| 1887 | NM_004047 | ATP6V0B | ttgctgcgtgttgatttggaggcactgcagtccaggCcgagtCctcagtg |
| 1888 | NM_004064 | CDKN1B | agacggggttagcggagcaatgcgcaggaataaggaagcgacctgcaacc |
| 1889 | NM_004067 | CHN2 | cagaagtgacatcctattgctttcaccatgttttatctgttagaagcaaa |
| 1890 | NM_004077 | CS | acctctttttgaacagggaattgattcaagattggacatggtctcctctg |
| 1891 | NM_004083 | DDIT3 | atgatgtgaccctcaatcccacatacgcagggggaaggcttggagtagac |
| 1892 | NM_004088 | DNTT | gtaatgggtaaggttctaataggccatgtttatgactgttgcatagaatt |
| 1893 | NM_004093 | EFNB2 | cagcttgtttaacggcagtgtcattcccctttgcactgtaatgaggaaaa |
| 1894 | NM_004099 | STOM | cttgcctgtacttgtcagaactagaggaaatagccaagactaatgaaaaa |
| 1895 | NM_004104 | FASN | gacattccacggggtcctactggatgcgttcttcaacgagagcagtgctg |
| 1896 | NM_004111 | FEN1 | cagaggagtaagatggtgatgttcacctggcaatcagctgagttgagact |
| 1897 | NM_004119 | FLT3 | aaacctcaagtgctcgcagaagcatcggcaagtcaggcgtcctgtttctc |
| 1898 | NM_004177 | STX3A | gggcattttagcattgattattggactttccgttgggctgaattaagagt |
| 1899 | NM_004208 | PDCD8 | ggcgggtagagcaccatgatcacgctgttgtgagtggaagattggctgga |
| 1900 | NM_004221 | NK4 | caaaaccctcaagaactgacagcattacactgaacaccgacaccaagagc |
| 1901 | NM_004235 | KLF4 | caatggtttattcccaagtatgccttaagcagaacaaatgtgtttttcta |
| 1902 | NM_004310 | RHOH | ttgcttccctttccccacaagaacaaagcactggccgggtaaggtggctc |
| 1903 | NM_004313 | ARRB2 | tattcaccctgggcgcgcgtccactccccggatgttttctgtgcaatcga |
| 1904 | NM_004320 | ATP2A1 | aatcctcaagttcgttgctcggaactacctagagggataactgttccccc |
| 1905 | NM_004324 | BAX | tgccggaactgatcagaaccatcatgggctggacattggacttcctccgg |
| 1906 | NM_004335 | BST2 | ggtagtacttcttgtccgcgattctcacgcttaagacctggttttctctt |
| 1907 | NM_004336 | BUB1 | ttccagaatggcagtgtattagtaggagagctctacagctatggaacatt |
| 1908 | NM_004343 | CALR | gacgggtggacttcccgctggatcgaatccaaacacaagtcagattttgg |
| 1909 | NM_004355 | CD74 | cagtcatggatgaccagcgcgaccttatctccaacaatgagcaactgccc |
| 1910 | NM_004374 | COX6C | ttgttaggtgggtgtccacgagtgactagctgtctttccataggtctggt |
| 1911 | NM_004380 | CREBBP | caagcgctctaattcctataaatacgaaactcgagaagattcaatcactg |
| 1912 | NM_004385 | CSPG2 | gcaagataccgagacatgtgactatggctggcacaaattccaagggcagt |
| 1913 | NM_004413 | DPEP1 | tttcgggacgaggcagagaggatcatgagggactcccctgtcattgatgg |
| 1914 | NM_004425 | ECM1 | cttgtggtaaggttgggttcttgatgccggggggtgtcctttaaccccag |
| 1915 | NM_004430 | EGR3 | cctcgctccttctggtatatgcatgtcactgcatgataattgagttttcc |
| 1916 | NM_004448 | ERBB2 | tgttaggagcctcaaaaccttcttgtatcccttttacagtcaaagtccaa |
| 1917 | NM_004449 | ERG | catttggggactgtgtacaatgagttatggagactcgagggttcatgcag |
| 1918 | NM_004454 | ETV5 | taaggggtgcactttatagctatggaaacatgagattctcctctattgga |
| 1919 | NM_004475 | FLOT2 | aacaacgggaacgttactgactctggtgccttatctcgaagggaccagaa |
| 1920 | NM_004494 | HDGF | gtagctttggaagtttagctctgagaaccgtagatgatttcagttctagg |
| 1921 | NM_004501 | HNRPU | gggtaagctaaatcatagtttctgacaataactgggaaggttttttctta |
| 1922 | NM_004508 | IDI1 | aagcaatccagccgagcttgaggaaagtgacgcccttggagtgaggcgag |
| 1923 | NM_004513 | IL16 | agatgaacataatctaccaacgaaagacgtgattcaattcaacactccct |
| 1924 | NM_004526 | MCM2 | aactaccagcgtatccgaatccaggagagtccaggcaaagtggcggctgg |
| 1925 | NM_004530 | MMP2 | cccctgttcactctacttagcatgtccctaccgagtctcttctccactgg |
| 1926 | NM_004557 | NOTCH4 | atgtaagatgttctttcctatatatggtttccaaagggtgcccctatgat |
| 1927 | NM_004583 | RAB5C | gggcatactctgcgttaaggtggacgttttgaccgagtcgatgcgccgtt |
| 1928 | NM_004615 | TM4SF2 | tgatttaatgtagtactctgcttctgtatccccgaggtgagtcagaaaaa |
| 1929 | NM_004624 | VIPR1 | ccagaagatcccctcaggactgcaacaggcttgtgcaacaataaatgttg |
| 1930 | NM_004633 | IL1R2 | atttctaagtgtgagggggaccactcacttactcgtacacgatgtggccc |
| 1931 | NM_004642 | CDK2AP1 | cccaccaaacctaacaaggacccccgaacactttcatactaagactgtaa |
| 1932 | NM_004688 | NMI | tccaggactcatattggcgactggtaatcgggatataactaaaagataga |
| 1933 | NM_004689 | MTA1 | ttggaatatatggtccaatgaagcacatccctcgcgcccgacccgccctg |
| 1934 | NM_004706 | ARHGEF1 | ttttgcaagaaggagaggaatgggggagaggacgtgagggaccaccccca |
| 1935 | NM_004725 | BUB3 | aacaattgatcccagaagggcaaattgtttgagtcagtaatgagctgaga |
| 1936 | NM_004815 | PARG1 | tatttttgatccggattacatcaaggagttggtgaatgatatcaggaagt |
| 1937 | NM_004827 | ABCG2 | acctccttctgtcatcaactcagatgggtttccaagcgttcattcaaaaa |
| 1938 | NM_004867 | ITM2A | tggtgaaaatcgccttcaatacccctaccgccgtgcaaaaggaggaggcg |
| 1939 | NM_004924 | ACTN4 | aatgaagacatagccgattctctgcccgggccccttgctgatgctcctcc |
| 1940 | NM_004936 | CDKN2B | gctggaacctagatcgccgatgtagatttgtacaggagtctccgttggcc |
| 1941 | NM_004938 | DAPK1 | agcagcatcatgtgcttcgggtgtcacgacgtctactcacaggccagcct |
| 1942 | NM_004941 | DHX8 | gattgccaccaatatcgcagagacatcgctgactattgatggtatctact |
| 1943 | NM_004972 | JAK2 | caataatgtaaatcaacgcccctcctttagggatctagctcttcgagtgg |
| 1944 | NM_004994 | MMP9 | ttctgccaggaccgcttctactggcgcgtgagttcccggagtgagttgaa |
| 1945 | NM_004997 | MYBPH | aataccgcgccctctctgagcaaggcgtctgcaccctagagatccggaaa |
| 1946 | NM_005012 | ROR1 | gagtgtttagaaagtgtaagggctctgcaactaaaaggacctgacctaga |
| 1947 | NM_005080 | XBP1 | cagctgattagtgtctaaggaatgatccaatactgttgcccttttccttg |
| 1948 | NM_005084 | PLA2G7 | caacacatcatgttacagaactcttcaggaatagagaaatacaattagga |
| 1949 | NM_005085 | NUP214 | atccttcggcacgctcgcgagtcagaatgcccccactttcggatcactgt |
| 1950 | NM_005098 | MSC | tccaaaaagagcttcctttcgtgacgagacgcggacgcaggtccaccctc |
| 1951 | NM_005104 | BRD2 | atccacctccatccgcttggaaatggccttcgtcccggcctatgactggt |
| 1952 | NM_005123 | NR1H4 | gttccttcgttcagctgagattttcaataagaaacttccgtctgggcatt |
| 1953 | NM_005157 | ABL1 | ttcatccctctcatatcaacccgagtgtctcttcggaaaacccgccagcc |
| 1954 | NM_005161 | AGTRL1 | gaccgtgaggatgaaattaatagtggggcctttgtgagctagaggctggg |
| 1955 | NM_005178 | BCL3 | tgaacctgcctacacccctataccccatgatgtgccccatggaacacccc |
| 1956 | NM_005187 | CBFA2T3 | gcctgaagctgagcgtgtacgttaatgtgaatgtatatagtctttgcaga |
| 1957 | NM_005192 | CDKN3 | taccgaaaaaccttaatacactgctatggaggacttgcgagatcttgtct |
| 1958 | NM_005197 | CHES1 | acacttttgctatataacctaagtgataaccctcttttagttacctgcca |
| 1959 | NM_005215 | DCC | aattttccgggaactttgcagcataccaattacccataaacagcacacct |
| 1960 | NM_005225 | E2F1 | aaggaactgaggcctgggtgatttatttattgggaaagtgagggagggag |
| 1961 | NM_005230 | ELK3 | ctgtcagcatggaaagtcgggggctttcgcccgggtcctcctagaaattc |
| 1962 | NM_005239 | ETS2 | ttacatttaatagacttacagggataaggcctgtggggggtaatccctgc |
| 1963 | NM_005245 | FAT | ggatacatcagattggatgccaagcgttcctctgccggacatacaagagt |
| 1964 | NM_005246 | FER | tcattagacgctgctgctggtatgttgtatctcgagagtaaaaactgtat |
| 1965 | NM_005248 | FGR | tcccctacccaggcatgaataaacgggaagtgttggaacaggtggagcag |
| 1966 | NM_005252 | FOS | attgttgaggtggtctgaatgttctgacattaacagttttccatgaaaac |
| 1967 | NM_005263 | GFI1 | agactattccctccgtttagagaatgtaccggcgcctagccgagcagaca |
| 1968 | NM_005317 | GZMM | tccaagtgctggacacccgcatgtgtaacaacagccgcttctggaacggc |
| 1969 | NM_005318 | H1F0 | ctacaaggtgggtgagaacgctgactcgcagatcaagttgtccatcaagc |
| 1970 | NM_005334 | HCFC1 | taacccctgtgactcaatattaccatagtgcgatgtcgttttgtgctatt |
| 1971 | NM_005335 | HCLS1 | cttttgtgaggattcgttaggaagaaaagcgctaagttagtgaatgaaac |
| 1972 | NM_005339 | HIP2 | gtgtctgctggaagtctactgccattatagggaaccttgcttgttagctt |
| 1973 | NM_005340 | HINT1 | gttcaaagattagagcgagtacttaatggtaaaataccgtcttatatgca |
| 1974 | NM_005356 | LCK | catatgcaccttgtgtctgtacacgtgtcctgtagttgcgtggactctgc |
| 1975 | NM_005375 | MYB | ttggtcacaaattgactgttacaacaccatttcatagagaccagactgtg |
| 1976 | NM_005385 | NKTR | gtgtacttaatcaccttagtgccagtttaatccagttatgcagaagaaat |
| 1977 | NM_005424 | TIE1 | atgaagtgtacgagctgatgcgtcagtgctggcgggaccgtccctatgag |
| 1978 | NM_005427 | TP73 | cagtcaagccgggggaataatgaggtggtgggcggaacggattccagcat |
| 1979 | NM_005439 | MLF2 | tctcaatttaccacccaaacgcgccaccgacccgatcccatcgtgaccga |
| 1980 | NM_005494 | DNAJB6 | gccagtttcattctgacgagctctatagtagtccggtgtggacctctgcc |
| 1981 | NM_005504 | BCAT1 | taacaaggaataatcccacaatatacctagctacctaatacatggagctg |
| 1982 | NM_005521 | TLX1 | aagggcccccacatttgtgccgacactgttctccttcggtggaagagctc |
| 1983 | NM_005529 | HSPG2 | aggagtctctgccacccactcaggattgggaattgtctttagtgccggct |
| 1984 | NM_005533 | IFI35 | ttcgctctctccgctcctatacctctatctgtcgtgcttaaacctctgct |
| 1985 | NM_005556 | KRT7 | tgtctgcagtggagagagggggagggcacacatgtggaagcttcggaaag |
| 1986 | NM_005563 | STMN1 | cgcccgaagagcctcagtgcttacactaaggagtcgtcttctatgcaata |
| 1987 | NM_005566 | LDHA | cgtccctctttttgttggttaccccattatcgtttgccctagcccccgcc |
| 1988 | NM_005572 | LMNA | agtgcgtgaggagtttaaggagctgaaagcgcgcaataccaagaaggagg |
| 1989 | NM_005583 | LYL1 | cttgaccctaggaagtgcccggcgtaccagtaccttcgccatccttttgt |
| 1990 | NM_005589 | ALDH6A1 | caatgaaaccagatttctcacttgctcttcatacttctattttgaggtaa |
| 1991 | NM_005608 | PTPRCAP | aagaattccaagggagcggacagtggcacgctgtgattgacacccaggcg |
| 1992 | NM_005621 | S100A12 | aaaacccagccttgcccgtggggagtaagagttaataaacacactcacga |
| 1993 | NM_005651 | TDO2 | aatctttcaacatacctgattccccgacactggataccgaagatgaaccc |
| 1994 | NM_005654 | NR2F1 | agcccacccagcagaaatacaatccgagctacaaagcatgggaaaaagag |
| 1995 | NM_005671 | D8S2298E | caaagctcttggaggctttaaagttctttctgttgggtgtgcattacagt |
| 1996 | NM_005687 | FARSLB | tggaccctttttgtgaagattggtctctgtggtgtgattctcttcccagg |
| 1997 | NM_005730 | CTDSP2 | cagagccagcctagtcattatttgctgtcgggtttccagtttcaccgtgt |
| 1998 | NM_005731 | ARPC2 | gtttcttggtaaatccagaatcaggatacaatgtctctttgctatatgac |
| 1999 | NM_005738 | ARL4A | agctaagctggaagggtgcttatccctgcgtagaaacgcctgccaatgct |
| 2000 | NM_005761 | PLXNC1 | ttccggaattcagtactgtggcattaaacgtcgtctttgaaaaaatcccg |
| 2001 | NM_005767 | P2RY5 | acccgccgtttttgttcagtctacccactctcagggtaacaatgcctcag |
| 2002 | NM_005781 | TNK2 | ctacctcagaatgacgaccattacgtcatgcaggaacatcgcaaggtgcc |
| 2003 | NM_005794 | DHRS2 | ctgccagactagcaatttgggggcttactcatgctaggcttgaggaagaa |
| 2004 | NM_005808 | CTDSPL | tgggaatcgaacctagggatagtgctccacttctgacgatggagtgaaga |
| 2005 | NM_005809 | PRDX2 | aacttaccgatcatcgcacgccggagttcgatcacgagaccgacggggaa |
| 2006 | NM_005826 | HNRPR | tgaaactgtgtgacagctatgaaattcgccctggtaaacaccttggagtg |
| 2007 | NM_005835 | SLC17A2 | ttgtccaggaatcttctcagattgatcactgtgcgaaagctcttttcatc |
| 2008 | NM_005845 | ABCC4 | cacttccaatggacagccctcgaccttaactattttcgagacagcactgt |
| 2009 | NM_005870 | SAP18 | tgtacttaagcatcactcaagggtaagtgttctaggaaggttgatttagc |
| 2010 | NM_005895 | GOLGA3 | gtgtgtcacaacaggctagggcacttcacgatgtcactacttgtttttct |
| 2011 | NM_005900 | SMAD1 | ctgctattctgaaattgcctacatgtttcaataccagttatatggagtgc |
| 2012 | NM_005902 | SMAD3 | agacacatcggaagaggcgtgcggctctactacatcggaggggaggtctt |
| 2013 | NM_005907 | MAN1A1 | tcatttgatccgcaagtctagcagcggactaacttatatcgcagagtgga |
| 2014 | NM_005911 | MAT2A | agggagtgttccctatccaatcaatcttgcatgtaacgcaagttcccagt |
| 2015 | NM_005923 | MAP3K5 | gatgtttgccttagacagtatcattcggaaggcggtacagacagccatta |
| 2016 | NM_005933 | MLL | attgtcatctttgccatgcgtaagatctaccgaggagaggaactcactta |
| 2017 | NM_005936 | MLLT4 | cttgagcggcatcgaatagaggcagctatggaccgaaagtctgatagtga |
| 2018 | NM_005944 | CD200 | ggactgtgaccgactttaagcaaaccgtcaacaaaggctattggttttca |
| 2019 | NM_005954 | MT3 | tttttcaccggggcgtggctaccctgtcgtgacgcgtttccgcgtattgt |
| 2020 | NM_005956 | MTHFD1 | aaaggtgtccctacaggcttcattctgcccattcgcgacatccgcgccag |
| 2021 | NM_005957 | MTHFR | ttggagcccgtgcagtacaggcaaaacacgcaagggcatcaggcactggt |
| 2022 | NM_005965 | MYLK | cttatttgtgctgttatagaatatcagctctgaacgtgtggtaaagattt |
| 2023 | NM_006005 | WFS1 | ttcagccactcaggaccctggctttctgctccaaggcactgaacacagtc |
| 2024 | NM_006017 | PROM1 | gagattttcatctattatactttatcaaagattggccatgttccacttgg |
| 2025 | NM_006038 | SPATA2 | cgtaacttaccctatggacaaaagcaggaatgactaacacatcctaggag |
| 2026 | NM_006060 | ZNFN1A1 | tgtcgcttcctagaatccccttctccaaacgattagtctaaattttcaga |
| 2027 | NM_006079 | CITED2 | cccagcagagtgagctgttgactcgatcgaaaccccggcgaaagaaatca |
| 2028 | NM_006082 | K-ALPHA-1 | cttcaattaccctctacaccattattacacattcacacaac |
| 2029 | NM_006084 | ISGF3G | ataattctcagtagttgtccgtgataatcgtgtcctgaaaatcctcgcac |
| 2030 | NM_006098 | GNB2L1 | tgttgaaatgagagcggtttcttacagtctacccggcgttgtggcacatg |
| 2031 | NM_006101 | KNTC2 | actacaccataaaatgctatgagagttttatgagtggtgccgacagcttt |
| 2032 | NM_006113 | VAV3 | cctgttagagaccctcatgggctaggacttttcatctaggatagattcaa |
| 2033 | NM_006120 | HLA-DMA | gcagaccctaatctctcctcaccgacagatggcacttcacagaacagaaa |
| 2034 | NM_006142 | SFN | gtgacgacaagaagcgcatcattgactcagcccggtcagcctaccaggag |
| 2035 | NM_006152 | LRMP | gcaagaggactcatggacgtctctagaacatatcttgtggccatttacca |
| 2036 | NM_006184 | NUCB1 | ttgtggaaccagtgatgcctcaaagacagtgtcccctccacagctgggtg |
| 2037 | NM_006185 | NUMA1 | aagagccagacagcgccaactcatcgttctacagcacgcggtctgctcct |
| 2038 | NM_006187 | OAS3 | atggcgctggtacgtaaatagaccaatgcagttaggtggctctttccaag |
| 2039 | NM_006190 | ORC2L | ttgatcagcctggctggtaccgtctagtactatgcagcggtcctcaagtt |
| 2040 | NM_006191 | PA2G4 | cagagttgctgagttcagtattgctaatgcagtatttttcattgtgcctt |
| 2041 | NM_006196 | PCBP1 | tctcccagtctccgcaagggagagtcatgaccattccgtaccagcccatg |
| 2042 | NM_006209 | ENPP2 | ggcttgtgttgtaatagtgtgggccgctttgtctcaaatccgcagttcta |
| 2043 | NM_006216 | SERPINE2 | taacttgctggccttatgcttacatggtctcatgtaatgtgcacaacaca |
| 2044 | NM_006230 | POLD2 | acattttcagcgttggctgagttacatgtacagtgcttaggccacctggg |
| 2045 | NM_006231 | POLE | agacaaccaggtgatgcacttctaccgctggcttcggtcgccatcctctc |
| 2046 | NM_006235 | POU2AF1 | agcctaaaggtgatgggtcctcgcctaggcttagtgctaccatgtgggtt |
| 2047 | NM_006255 | PRKCH | cccaaagggaatagagattctccaggaatttcctctatgggaccttccca |
| 2048 | NM_006263 | PSME1 | ggctgcgataagtgaagagttgaaccacacaacccgcgttgtgaataatt |
| 2049 | NM_006268 | DPF2 | aaaggagcaacacactgcccctaggcgtgcgtgtggcccagtttctctct |
| 2050 | NM_006273 | CCL7 | tttgggttttcttgtccaggtgcttcataaagtcctggacccacttctgt |
| 2051 | NM_006286 | TFDP2 | gagattgctacacggagcagtccttgacgatcgtgtttctgacgtttctc |
| 2052 | NM_006299 | ZNF193 | tttcagtttcatattacccctatatgcatcaaagctgcaacttcccttgc |
| 2053 | NM_006301 | MAP3K12 | actgctgactggtgagatcccctacaaagacgtagattcctcagccatta |
| 2054 | NM_006302 | GCS1 | tgcctgtagcccatatgctagaggttggtgaccctgacgacttggctttc |
| 2055 | NM_006325 | RAN | gcattcttcttacttccccgtacgctttctgtgctattccgcctccccct |
| 2056 | NM_006329 | FBLN5 | tcctcatcttttcgcaccaccaagcctactaatgcccacgggctctcagg |
| 2057 | NM_00634-3 | MERTK | tgacgttcggaaccaagcagacgttatttacgtcaatacacagttgctgg |
| 2058 | NM_006354 | TADA3L | gctgaaggcacttagtgcccacaaccgcaccaagaagcacgacctgctga |
| 2059 | NM_006355 | TRIM38 | ctatgaggccggagttgtatccttttataacgggaatactggctgccaca |
| 2060 | NM_006362 | NXF1 | gaagcagtcccccctgtaaatagtccttggatattaccgtctggttgtcg |
| 2061 | NM_006427 | SIVA | ccccatgtcagtgccgtcatctagactgattatgcccgcagtgatcctgt |
| 2062 | NM_006472 | TXNIP | cctattgcactgtgttctcctactgcaaatattttcatatgggaggatgg |
| 2063 | NM_006495 | EVI2B | gataatacaatcatttccaccgcttgactcacttaacttgcccctgccac |
| 2064 | NM_006509 | RELB | tctgacccccatggcatcgagagcaaacggcggaagaaaaagccggccat |
| 2065 | NM_006522 | WNT6 | taaaggcctctggatactgggctccccagaactgctggccacaggatggt |
| 2066 | NM_006534 | NCOA3 | ctccaaggaatgcacccacgagccaacatcatgagaccccggacaaacac |
| 2067 | NM_006559 | KHDRBS1 | tgatacatacgcagaacaaagttacgaaggctacgaaggctattacagcc |
| 2068 | NM_006565 | CTCF | tttaagagagccatcagttagctatcagactctaggttgatgcattttgt |
| 2069 | NM_006579 | EBP | ctaagtgaccgccccacctgtggcttatacgtggcgtggcctctttcttc |
| 2070 | NM_006591 | POLD3 | cccaatatgctgcctcaactctgagctgtctgcaaggcttagtaagtatt |
| 2071 | NM_006602 | TCFL5 | caagccatcgtggttggctggaactagacgtgtgatttgaatgcaggagt |
| 2072 | NM_006676 | USP20 | ttctttgccgctgatgagttaaagggtgacaacatgtacagctgtgagcg |
| 2073 | NM_006739 | MCM5 | tgctggccaagcatgtcatcactctgcacgtgagcgcactgacacagaca |
| 2074 | NM_006747 | SIPA1 | cctctcagagaaggtctctcacttggagtccatgctcaggaagctgcagg |
| 2075 | NM_006748 | SLA | tggaactactttaactaatccatagggacttctggtatgctttcctctct |
| 2076 | NM_006759 | UGP2 | aaataaaacacgtgcagatgtaaagggcgggacactcactcaatatgaag |
| 2077 | NM_006762 | LAPTM5 | tgtcgctggccatccattcagtcgattcagtcataggcgaatctgttctg |
| 2078 | NM_006769 | LMO4 | ctgctaaaaggtcagagtaatgcagaatgcgtgccttcatctcagatttg |
| 2079 | NM_006803 | AP3M2 | tcaaagaccatgatggtatcggactagttttcagacactgcctgttgctg |
| 2080 | NM_006820 | IFI44L | ctagtgttcatggaggtagcattgaagatatggttgaaagatgcagccgt |
| 2081 | NM_006825 | CKAP4 | gtcggcaaggagcgtgcatactgcgtttgtgtaattgtttgctgtatctc |
| 2082 | NM_006845 | KIF2C | ctccaaaagaaagtcttcgaagccgctccactcgcatgtccactgtctca |
| 2083 | NM_006857 | RY1 | ttggtaaacattggcttgcctcccatgacttgccattataattaaaactg |
| 2084 | NM_006875 | PIM2 | ctaccaccacacaaacttagttcatatgctcttacttgggcaagggtgct |
| 2085 | NM_006904 | PRKDC | ggatcgactttgggcatgcgtttggatccgctacacagtttctgccagtc |
| 2086 | NM_006910 | RBBP6 | aggctagaacgtcagataaacatgattccactcgtgcttcctcaaataaa |
| 2087 | NM_006931 | SLC2A3 | aacttcatgtcaactttctggctcctcaaacagtaggttggcagtaaggc |
| 2088 | NM_006932 | SMTN | agagcgactgcacataggggaaaacacacttggggtcaggctttttgccc |
| 2089 | NM_006937 | SUMO2 | ttttttgtacgtagctgttacatgtagggcaatctgtctttaagtaggga |
| 2090 | NM_006938 | SNRPD1 | aactgtaaccattgaattgaagaacggaacacaggtccatggaacaatca |
| 2091 | NM_006963 | ZNF22 | tggggcatgactattcgatttgactcaagcttcagtagactcagaagaag |
| 2092 | NM_006981 | NR4A3 | ggattagtgggctgcgtttcaacattccgtgttcgtactcccttttgtat |
| 2093 | NM_006994 | BTN3A3 | acatggctcgtggagagaagtctttggcctatcatgaatggaaaatggcc |
| 2094 | NM_007022 | CYB561D2 | ttcaggctacaaccactagcacggctgacgatggccctttctgcggagac |
| 2095 | NM_007063 | TBC1D8 | ttcaaccaccgagtgatcggggcacaagttgaccagtctgtcttcgagga |
| 2096 | NM_007065 | CDC37 | ttctatttggcaaacagcaatgatcttccaataaaagatttcagatgctc |
| 2097 | NM_007079 | PTP4A3 | ttattagaccccggggcagtcaggtgctccggacacccgaaggcaataaa |
| 2098 | NM_007117 | TRH | ggtgtcccaacgtataaactatcacagtagcgctcatggctcgtaggttt |
| 2099 | NM_012092 | ICOS | ttgtaatttgaatctagtatggtgttctgttttcagctgacttggacaac |
| 2100 | NM_012120 | CD2AP | caggttttacgatgtataatttacctaatagaccaaactaactcatggag |
| 2101 | NM_012207 | HNRPH3 | caacatacaatcttacaacacatcttctactaactttcttaca |
| 2102 | NM_012223 | MYO1B | cgaccattgctgcatattggcatgggacccaggtacgtagagaatacagg |
| 2103 | NM_012267 | HSPBP1 | acacagttgccctaatgcggctggaatccccattgggggtaggtgagcag |
| 2104 | NM_012317 | LDOC1 | gtcttacatgctcgtgaacgagaaccgattctgcaacgacgccatgaagg |
| 2105 | NM_012323 | MAFF | cctccccactgtttatttattgcacggatctaagttattctccccagcca |
| 2106 | NM_012334 | MYO10 | tacagatataataaccatgttgactatgggggagagacgctgcattccag |
| 2107 | NM_012384 | GMEB2 | ccaaaataatggtgagtgcctaggcttcccgagttagctctttgggtggc |
| 2108 | NM_012417 | PITPNC1 | atatccaggagattcattaggtcatcagcgatcaaaggttagcattttat |
| 2109 | NM_013282 | UHRF1 | gggctgtacaaggtcaatgagtacgtcgatgctcgggacacgaacatggg |
| 2110 | NM_013314 | BLNK | taagaagctcatgtggacttgttctattgcctgacctgatgaactgttaa |
| 2111 | NM_013416 | NCF4 | atcctccttttgtcttcacctcgatgacgaaaacctaaggaggacagagg |
| 2112 | NM_014005 | PCDHA6 | cgccctaagtcctccagtctccttagagctagtacttactaagcatttac |
| 2113 | NM_014207 | CD5 | catctatagtttggccaccatacagtggcctcaaagcaaccatggcctac |
| 2114 | NM_014232 | VAMP2 | gaagttcagtatgttatgatggaccaataattctgcccttcgggtttctc |
| 2115 | NM_014244 | ADAMTS2 | accctctccgcccttggggtaatgtactttgtgatattgccacccgcccc |
| 2116 | NM_014298 | QPRT | ccacatggggttctgcggtgataatgagcacatagtgaggggtcagcaaa |
| 2117 | NM_014345 | ZNF318 | attgaactcattccctgttccacaaacccatatgtatcctttcctcaacc |
| 2118 | NM_014365 | HSPB8 | tccctccgcggattctccggggctggttcatcacctccgaatattcctgt |
| 2119 | NM_014575 | SCHIP1 | atgtgacctgctttcgatcataagactgtgttaagaccttctcctcagtg |
| 2120 | NM_014595 | NT5C | tttacggcagacgtacccccgttcaccccacgttactagtaggggaccga |
| 2121 | NM_014614 | PSME4 | acccagcgatgtgttgcagaaattatagctggtttaatcagaggttctaa |
| 2122 | NM_014624 | S100A6 | caccactacgcgcacgcagcgatataggcatcgcacctctatcatcgtca |
| 2123 | NM_014667 | VGLL4 | agtcctagatatacttactgctggtacagttgtactctaagattggtatt |
| 2124 | NM_014707 | HDAC9 | ttcctactgagtaaatcagcaacgaaagacactccaactaatggaaaaaa |
| 2125 | NM_014724 | ZNF305 | ctacctttatattctccaacacaagaccgtgtaggtgtcccttcagagag |
| 2126 | NM_014734 | KIAA0247 | aagtctttccatcatagcaggcgtgaccagggggtatctggggaccaggt |
| 2127 | NM_014735 | PHF16 | gaacaaaatcgtatccgagatacccactagagagcaagaataaccgtttg |
| 2128 | NM_014780 | CUL7 | gggtgaagacggccagaacttggagaagagacggaatcttctgaactgcc |
| 2129 | NM_014792 | KIAA0125 | aggagaaaacacggtaacgtaattagaatagtcagagaaaagtagccaga |
| 2130 | NM_014824 | FCHSD2 | gtatccttagaatccaaatgtctagataagttgaggacacatacctgcat |
| 2131 | NM_014890 | DOC1 | actgcaggataaccgaactcaaggcttaattaacggggcactaaacaaaa |
| 2132 | NM_014899 | RHOBTB3 | atattcactcccggaaatgtcgttgcttagtaatgtaacctggagctttt |
| 2133 | NM_014914 | CENTG2 | agctcggctcaaagtgcgaagttgtttagatttccacgttacacaaacac |
| 2134 | NM_015050 | KIAA0082 | gggtatatcagtgtgtcttgcagaatcttggatcattaaagataaacata |
| 2135 | NM_015069 | ZNF423 | acacgatgagccagcacgcacagtgagggatcgctcaacaggacacctct |
| 2136 | NM_015099 | CAMTA2 | acatgatctcactagccaagcagatcatcgaagccacaccggagcggatt |
| 2137 | NM_015147 | KIAA0582 | ccagttttagaggatgtccttgggaggatcgcaaagcagtctggtgagct |
| 2138 | NM_015149 | RGL1 | cagtttctggcaaccccgtgtatttccgttttccccctaaagaacatatc |
| 2139 | NM_015158 | ANKRD15 | acttgaatctcaaagaagtgcggtctatcggttgtggagattgttctgtt |
| 2140 | NM_015166 | MLC1 | acctggggaacgtgttcccggctgagatggattacttgcgctgtgctgca |
| 2141 | NM_015196 | KIAA0922 | aatactacccggggttcaacccgtttcgcgcctatatgaacctggacata |
| 2142 | NM_015210 | KIAA0802 | aggaacttcggcgagaactggaccgcgctaataaaaactgccgaatcctg |
| 2143 | NM_015261 | KIAA0056 | agttcagctgttgacgccttgcagaggctttgtagagcatctgcagagac |
| 2144 | NM_015335 | THRAP2 | gtgtactgccagtgcaggcgaccactgcctacacagatccacattaaatc |
| 2145 | NM_015436 | RCHY1 | ccgactttgacactgttatctccgtaatagctttaccattaggctaggat |
| 2146 | NM_015458 | MTMR9 | aagagtgctgtaaggtacaggtttccatattgtgaacctgtgtacgcaca |
| 2147 | NM_015474 | SAMHD1 | gacagtacttcagtccaaaatccaactcgcctccgagaagcatccaaaag |
| 2148 | NM_015528 | RNF167 | gttgtatccagcaccggaaacggctccagcggaatcgacttaccaaagag |
| 2149 | NM_015568 | PPP1R16B | atatcgtactgaggtaacttccacgtagccccttgccacgcggcaccggt |
| 2150 | NM_015570 | AUTS2 | acaggtcaaccttgtggagccatcgcgagttagagggtgaaagatggcag |
| 2151 | NM_015636 | EIF2B4 | ctggctaactggcagaaccacgcatccctacggttgttgaatctagtcta |
| 2152 | NM_015670 | SENP3 | tcacctattttgactcgcagcgtaccctaaaccgccgctgccctaagcat |
| 2153 | NM_015710 | GLTSCR2 | ttcacttaaccatacggtcagcctagttagagtatgtgattcagtggctt |
| 2154 | NM_015833 | ADARB1 | cacagtctatggaacgctaatggagtcagcccctaaagctgtttgctttt |
| 2155 | NM_015855 | WIT-1 | ggcccatgaaattgatgaactgagagttgcttccagtcctgagcgcacca |
| 2156 | NM_015869 | PPARG | ttgcttaccaaactggacatcattgatgatctggattcaggcagggtctg |
| 2157 | NM_015965 | GRIM19 | atcgcgctgttgccactgttacaggcagaaaccgaccggaggaccttgca |
| 2158 | NM_016041 | DERL2 | aattactggttggtttgtaaacaccatcctccattcgacccattgacttc |
| 2159 | NM_016091 | EIF3S6IP | ttcattccctggtagacaaatccaacatcaaccgacagttggaggtatac |
| 2160 | NM_016184 | CLECSF6 | ttggattggtatctgtcattgtagggatagataataagctcttcttattc |
| 2161 | NM_016195 | MPHOSPH1 | tcaaagcactcgatttccaaaacctgagttagagattcaatttacacctt |
| 2162 | NM_016221 | DCTN4 | ctgctgttaatgatccagcattggtcacaatgtaccaactgctttctgca |
| 2163 | NM_016308 | UMP-CMPK | caacttgtacaaagttgtatgacagggcatattctttgcttccaagattt |
| 2164 | NM_016343 | CENPF | gacaggaaagactagcccatatatcctgcgaagaacaaccatggcaactc |
| 2165 | NM_016570 | PTX1 | aataatttgctgtcgtttcagacttggatcctataaacctgtcaattctg |
| 2166 | NM_016734 | PAX5 | gcctggggtaattggaggatccaaaccaaaggtcgccacacccaaagtgg |
| 2167 | NM_017437 | CPSF2 | ggaaggatcgatcttatttaactatgtgtggaacaacccagtaatatcag |
| 2168 | NM_017448 | LDHC | gttgtaatctagactctgcccgtttccgttacctaattggagaaaagttg |
| 2169 | NM_017617 | NOTCH1 | tcactgtgggcgggtccaccagtttgaatggtcaatgcgagtggctgtcc |
| 2170 | NM_017771 | PXK | atggaactcttctttggggactattactttgcaaatggggtcagagcctc |
| 2171 | NM_017787 | C10orf26 | cattgatcttacgcatttactgtttaccgaacaaatgtctgactgtgtac |
| 2172 | NM_017794 | KIAA1797 | cctaagagaggagtgcattgctttagtacccgggccagttgagactgaaa |
| 2173 | NM_018136 | ASPM | tacagttatcctacaagcactggtgcgtggttggctagtacgaaaaagat |
| 2174 | NM_018209 | ARFGAP1 | tcagccacttgcagaacaggatgggaccgagatttcagcgagccctcctg |
| 2175 | NM_018248 | FLJ10858 | aaattaatatgacagatggccctcgtaccttaaatcctgacagccctcgc |
| 2176 | NM_018462 | C3orf10 | agagtacattgaagctcgggtgacaaaaggtgagacactcacctagaaca |
| 2177 | NM_018664 | SNFT | agcattgttcaaatgagtacactgtcagtggggtttaagatcatttggtg |
| 2178 | NM_018951 | HOXA10 | gtattgctgctgtgcgtggaaaaagacgatgtttatgttcttatagaata |
| 2179 | NM_019028 | ZDHHC13 | cactgccatgtatgcaactgctgtgtggctcgatatgatcaacactgcct |
| 2180 | NM_019071 | ING3 | tgccctatagaatggttccattatggctgcgttggattgacagaggcacc |
| 2181 | NM_019102 | HOXA5 | tcatagttccgtgagcgagcaattcagggactcggcgagcatgcactccg |
| 2182 | NM_019111 | HLA-DRA | aaagatcgtaacgcgagagccatccgccctatgtgggagatcccacaccc |
| 2183 | NM_019841 | TRPV5 | tgattaacatcgctatcactcttgaccttactcccggttggcctgggggc |
| 2184 | NM_019846 | CCL28 | atacggccataaaactccttattagagagtctacagataaatctacagag |
| 2185 | NM_019857 | CTPS2 | aactggccttaggagatccaaatagggaaccaagattgcagagtgtccca |
| 2186 | NM_020310 | MNT | tctagtgccgaatgactatgtccagattggtgacgatgggtgttgctgtt |
| 2187 | NM_020368 | SAS10 | gcaggtcccacgctcaccgacgaaaatggagatgatttaggattgccacc |
| 2188 | NM_020371 | AVEN | cgactcaacgttgctgccgaactggtccagggtacagttcctttagaggt |
| 2189 | NM_020631 | KIAA0720 | tcaccttcgaggcctacaggttcgggggacactaccttcgtgtcaaagcc |
| 2190 | NM_020657 | ZNF304 | tctagaggggacatccacaagtctcggtgcagttatgatggtgtgggatg |
| 2191 | NM_020841 | OSBPL8 | ggtgacccacctcttaggactttggtcttatccacgtgtatgttgttttc |
| 2192 | NM_020843 | ZNF291 | cctcacaaggtgatccttttaacaatcgagttcaggaccttatcagctac |
| 2193 | NM_020892 | DTX2 | acagggcctgatattagtgaaactacactgggatagcatcagccatttaa |
| 2194 | NM_020944 | GBA2 | tgcaggtttatcgggactattacctcacgggtgatcaaaacttcctgaag |
| 2195 | NM_020956 | PRX | cgaaagtgtcaaagattcggctgccggaaatgcaagtgccgaaggttccc |
| 2196 | NM_020998 | MST1 | tggacatgccaatacacattactgacaggtatgcccacctgacctgcacc |
| 2197 | NM_021019 | MYL6 | accagaacagagcacaacaaaggacgagcagcgccagccgagacgacgta |
| 2198 | NM_021025 | TLX3 | ggcgcctgtattatactttgtacttttgcccaaacgtgtaaataataaaa |
| 2199 | NM_021038 | MBNL1 | gtgtaaccatgattctattatgtattggtacgtctgtagaccaagatata |
| 2200 | NM_021071 | DO | gaatggcactctgtgctatgaggtgcattataggacgaaggatgtccact |
| 2201 | NM_021103 | TMSB10 | tccacatcacgactggggtctcgaagaggacgggggtaggaaatcctcca |
| 2202 | NM_021111 | RECK | tacagataattacctactctggctagaagctaggggtcccagtgaagagc |
| 2203 | NM_021114 | SPINK2 | actatactctcccttatcgcgcgtctatatggccccgatcacccttccgc |
| 2204 | NM_021603 | FXYD2 | ccccaggagcttactacaagtgctagaaatctggacaccaggccaaggaa |
| 2205 | NM_021643 | TRIB2 | cagtagagacaagcgggaaggataattagctgaaagctatgatgatataa |
| 2206 | NM_021814 | ELOVL5 | actgctaaaggacaagtttagtcatacactgcataaccatattttggtca |
| 2207 | NM_021906 | USP9X | aacagaacgtacaattcatgcataaccgaatgcagtacagtatggagtat |
| 2208 | NM_021949 | ATP2B3 | tctctgtcgtagacacaccgataggaccaatggccaatagatattaaaag |
| 2209 | NM_021960 | MCL1 | agcaggtggtaataccatgggtgctgtgacactaacagtcattgagaggt |
| 2210 | NM_022067 | C14orf133 | agaacaatgcccctgtgcagatattacaggagtatgtcaatctggtggaa |
| 2211 | NM_022127 | SLC28A3 | tgtggttttgccaatatcgggtccctaggaatcgtgatcggcggactcac |
| 2212 | NM_022161 | BIRC7 | cccttgcttggcgtgggggatggcttaactgtacctgtttggatgcttct |
| 2213 | NM_022334 | ITGB1BP1 | tttgaggtcacgcggctagtaattggagcctggtttagaaccaagtcagt |
| 2214 | NM_022366 | TFB2M | cgttccaaagattgtgcttataaatggctgtatgatgaaaccctggaaga |
| 2215 | NM_022436 | ABCG5 | agatgtccacacgaggggtcggagttacctgatcacatcgagagagtgct |
| 2216 | NM_022438 | MAL | ggatttattaaaaccaagttgtccctaaggaatcagatgtgggcatctct |
| 2217 | NM_022469 | GREM2 | aaacacgagcacactctcttcgaacccaattgtgggtgtagcaatgaaag |
| 2218 | NM_022549 | FEZ1 | cttgctcgctactttctagggtcttaatagtagtcaagaaaagggatctg |
| 2219 | NM_022716 | PRRX1 | ggctaattctaagcactaaagtctacatctaagctatagatttaagcttg |
| 2220 | NM_024006 | VKORC1 | tgctacgtgctcattagtgttcgtccgacgacgaccgtcatatgtccacc |
| 2221 | NM_024099 | MGC2477 | tacaaaaacaaatgagcccgggatagtggcacaggcatgtagttccaact |
| 2222 | NM_024319 | C1orf35 | aggatcagacggaaagcaggggagtttctcgggtcacccttgaagagagg |
| 2223 | NM_024408 | NOTCH2 | ttctttcacaccgtgtggtccgtgttactggtatacccagtatgttctca |
| 2224 | NM_024424 | WT1 | ttgtttcttcttttaccatccttggcacttttagcggggggagaggaggt |
| 2225 | NM_024713 | C15orf29 | cacgtctgtgatttgagaggtgagttatttaagaggccagttttcaggac |
| 2226 | NM_024728 | C7orf10 | actcttcctcataacctcatccaatacactcaaacaacact |
| 2227 | NM_025263 | PRR3 | agcatgatccccaccgctatggtctatctatgatcaccgtgctttgtgaa |
| 2228 | NM_030660 | ATXN3 | tgagatgtacagagagtttcttgctgggtcaataggatagtatcattttg |
| 2229 | NM_030674 | SLC38A1 | acacttgaatcttggtcgttggtatgtaatccactctctagagtccagtg |
| 2230 | NM_030915 | LBH | ttatttttgctggtccctagaccactttgtatgaccgtttgcagtctgag |
| 2231 | NM_030926 | ITM2C | catgtttttactgatcattcgatatgctaaccgttctcagccctgagcct |
| 2232 | NM_030935 | THG-1 | ggaaagctgtagacatgcggctgcggatggagttgggtgctccagaagag |
| 2233 | NM_031243 | HNRPA2B1 | ttcaattgatgggagagtagttgagccaaaacgtgctgtagcaagagagg |
| 2234 | NM_031423 | CDCA1 | aaagaaaagttgaagcgaatggaagtatcagaagtaccaaataatgttgg |
| 2235 | NM_031966 | CCNB1 | ttcctactgtagggtagcggaaaagttgtcttaaaaggtatggtggggat |
| 2236 | NM_032121 | DKFZp564K142 | gtagaaacattttaggccatgtataagttacactgattttagcactaagc |
| 2237 | NM_033238 | PML | ctgttttcagatgtgattgaggggtgttctgccctgcctccactgtcaca |
| 2238 | NM_033512 | TSPYL5 | tattgaaaatccaagacactatgccaatgcaaccgtgactactttgggag |
| 2239 | NM_033554 | HLA-DPA1 | cttagatcccccctcggagtagcggctcacgcaacacaaagtatagcaca |
| 2240 | NM_033642 | FGF13 | ggaaacctggcacgggccaacttttcccgattatcacgccaagaagttgc |
| 2241 | NM_057168 | WNT16 | atactcaggataagatccttgaatatggaacttagttacaggactcaata |
| 2242 | NM_058195 | CDKN2A | atagatacatttcccgtatacttctgcgactatatctctctgtatttcta |
| 2243 | NM_080284 | ABCA6 | cctgtatcacttggttgggggatcctaattcatctaaggtttggccttat |
| 2244 | NM_080700 | TREX2 | cggctttagttacgatgactacagttcccacgtgcgcaactctgcccttg |
| 2245 | NM_130439 | MXI1 | aaacctatagtgcacattttaactgccccctaaattacccttccctgggt |
| 2246 | NM_133259 | LRPPRC | gagctaggtatagtgaccgtgaactttctaacgcataatattctgtgata |
| 2247 | NM_133378 | TTN | acgctccacccaaagccgaactggatgcccgattacacggtgatctggtt |
| 2248 | NM_138714 | NFAT5 | tagtgtacttcttgtctatcctcagttaatttacctagacaaaaagtgtc |
| 2249 | NM_144578 | C14orf32 | attcttaccattaagttaacaatggacgaagagatgacgctttgcttttt |
| 2250 | NM_144628 | TBC1D20 | ccttggcgtcgttttttgggtctgacttgtctcgtcaactgctggtctct |
| 2251 | NM_145698 | ACBD5 | gttcctgctttgtttaataagaacctcatttaaacttgacagctatggta |
| 2252 | NM_145867 | LTC4S | aactttaatgatagagactaggatgcggaagcgagcgcccctccccgggg |
| 2253 | NM_147180 | PPP3R2 | aattttacatggaggaagtgagcacatgtcatgctagccaagaggacatt |
| 2254 | NM_152739 | HOXA9 | atccccgcacaaagcggctctaaacctcaggccacatcttttccaaggca |
| 2255 | NM_152788 | EB-1 | gcttgtgcaaaaatgcgggctaactgtcagaagtctacagagcaaatgaa |
| 2256 | NM_152827 | SNX3 | agaaactggtataacatgccttcagtatactaacactcatatgctcagtt |
| 2257 | NM_152890 | COL24A1 | acacaaacaagtggcccaggattgcctattggtttcaagggatggaatgg |
| 2258 | NM_156038 | CSF3R | gcctcccaggcgatctgcatactttaaggaccagatcatgctccatccag |
| 2259 | NM_172020 | POM121 | catatatagatttctagaactccctctttgcatagtgccctcctttcttt |
| 2260 | NM_173156 | C1orf16 | ctaaaatcagtgctatctacaagccgaaatttaagcaacaactgtgacac |
| 2261 | NM_173216 | SIAT1 | ggtagagaaggatacagtgtctatcctcaagttgctacggttcagtgaga |
| 2262 | NM_173609 | C15orf21 | cactttgaacgccttagaggcaaaaagagctttgtgagttgtaagaggaa |
| 2263 | NM_173852 | KRTCAP2 | agacagatgacgcttttcgattctgcaccttgtatagctcctggagttgg |
| 2264 | NM_175739 | SERPINA9 | gccttccgcctataccgcaggctggttttggagaccccgagtcagaacat |
| 2265 | NM_175744 | RHOC | tccaggtccgcaagaacaagcgtcggaggggctgtcccattctctgagat |
| 2266 | NM_178586 | PPP2R5C | aatgtcactattccaagtgtctttttagtgtggctttagtatggcttcct |
| 2267 | NM_181311 | TAZ | caccagggaaagtgaacatgagttccgaattcctgcgtttcaagtgggga |
| 2268 | NM_181336 | LEMD2 | tcgtcctgacacgattccaaaggtctgccatactcttcagaggagttcgg |
| 2269 | NM_181339 | IL24 | aggaggtgggatatcacttccatgacataagtgctattgcagagccgtgg |
| 2270 | NM_181430 | FOXK2 | caagttcagacgaagctactctggcatctgcacatttccgtgttacagca |
| 2271 | NM_181493 | ITPA | atccttccttcgtctggctcgtgattcacttattcgccctccctactttg |
| 2272 | NM_181702 | GEM | agatgtggtttcccccattgtagcagggagctagcgtattagccttgtgg |
| 2273 | NM_182729 | TXNRD1 | tgtgcagaggtattcacaacattgtctgtgaccaagcgctctggggcaag |
| 2274 | NM_182810 | ATF4 | ggtcccctagttgaggatagtcaggagcgtcaatgtgcttgtacatagag |
| 2275 | NM_183395 | CIAS1 | ggggttcagataatgcacgtgtttcgaatcccactgtgatatgccaggaa |
| 2276 | NM_198232 | RNASE1 | caattatattaaactcggccaaaccctctgcgggataaaggggttttgtt |
| 2277 | NM_198400 | NEDD4 | tcagtgcatttcacccaacgaaaagcagctacattagactgtgaaacaac |
| 2278 | NM_199335 | FYB | ggtctgtccagctttcacacattgatatgtgaggctacatttgcatgtta |
| 2279 | NM_199423 | WWP2 | gccggccagttaattcattctcagccaatgaaggtttgtctaagctgcct |
| 2280 | NM_201592 | GPM6A | taattttacaagttcttgtagtaggtagggggtactactagggatatctg |
| 2281 | NM_201632 | TCF7 | tctactccgccttcaatctgctcatgcattacccacccccctcgggagca |
| 2282 | NM_201998 | SF1 | cttttttcggtgttagattcaacactgcgctaaagcggggatgttccatt |
| 2283 | NM_212474 | FN1 | gtcaacgaaggcttgaaccaacctacggatgactcgtgctttgaccccta |
| 2284 | R14777 | CYFIP2 | agcagcgtcgctttgacctgttcgacttctgttaccacctgctaaaagtg |
| 2285 | R56397 | PIK3C3 | gtgagcagtaccaagagttccgtaaacagtgttacacggctttcctccac |
| 2286 | R59027 | GRP58 | ctctttttgtggatttgatgaccttatggatattgccaaagtttaaggca |
| 2287 | R72151 | GNL3 | ctgttctctgtataagttatggtatgcatgagctgtgtaaattttgtgaa |
| 2288 | R79128 | MAP3K1 | ctctgtatgtaacaatccatcattcaccttcactactggtagtaacatag |
| 2289 | R86893 | C6orf110 | cccgtgttacaacgtggctcgcctaatgttcctcgatgcagagaggaaga |
| 2290 | T07281 | NRIP1 | gactaataaaagtacaaggcacatatacgtgacagaattggtactcaatc |
| 2291 | T28925 | ITGAL | cgtacttagcagctatctctcagtgaactgtgagggtaaaggctatactt |
| 2292 | U60115 | FHL1 | atgtaatgacaatacatactaacattcttgtaggagtggttagagaagct |
| 2293 | U79271 | AKT3 | tctggtttagacttaatatgccacaacgcaccacgaccttcccagggtga |
| 2294 | W04885 | MYL4 | atcttcttgtcgtgaccccgatcacaaataacaaatgctcttaacactct |
| 2295 | X66087 | MYBL1 | ctggatatacatagtctgcaatcaccaaagtataatatcttgtaaggcta |
| 2296 | AK024272 | | gaggttgcgacaagctactccaatacccctgctgggatagtgtcacagaa |
| 2297 | AK025231 | IGLC2 | caaagctgaaaccaaatctttataacaagggtggttaggtcagcattctt |
| 2298 | AL080190 | | ccatgcttgaaaatgtctgaatggcagtaatgaggataagttttttaatc |
| 2299 | BU618233 | | actcctattattcatcgcaagactcttctatagtaatccagttcaagata |

TABLE 22
60mer polynucleotide probes, according to one embodiment

| | GenBank | | |
|---|---|---|---|
| SEQ | Accession No. | | |
| ID | for Target | | |
| NO: | gene | Symbol | 60mers |
| 2300 | AA594161 | MYH11 | aactgcggctggaagtcaacatgcaggcgctcaagggccagttcgaaagggatctccaag |
| 2301 | AA766908 | MME | acagagcagtaccagcgctctaaaagcacctccttgtcactttattactccagaacaac |
| 2302 | AB014540 | SWAP70 | ggctaagatagatacttgtgaatcaaagatagcacagaaatgaactaagtatatcccatt |
| 2303 | AF196185 | PARD3 | gtttcttaatcacgtgcggcggtgtctaagtggtgttaccagtgtacgcgcagtgacctt |
| 2304 | AI597616 | MRPL33 | taagctcattcttagtcgtagatagcttgggaatctcatatgcagagtatccatattgac |
| 2305 | AI634809 | ARID5B | ttctcttaccatccgatattaagttgggcatgatccaactagtatcactaccttttgaag |
| 2306 | AI672553 | AKAP12 | ctgcattcacacatggcatgaaataagtcaggttctttacaaatggtattttgatagata |
| 2307 | AI809213 | RGS13 | aggacagtatatgagatttctatcgtacagggcaagcctacattgtggacatattctaga |
| 2308 | AK022231 | STAT1 | tcgcactctgtgtatataacctcgacagtcttggcacctaacgtgctgtgcgtagctgct |
| 2309 | AK022293 | CTSD | gccagtaaaggcacccctagctcttgggatgtttgtatccaactccgggcaatgtggggc |
| 2310 | AK055652 | C3orf6 | ataatttagaaacgtgatctcttgagagagagactacgcattgcctgggcactttcagat |
| 2311 | AL080130 | FLJ14001 | gtgagaataaatttagctgcataaaacgttcggctcatttatctgacatcttagtcacat |
| 2312 | AL833316 | MIR | gccctcagtctttttgggccttaggcgtttcgttcatcctgctaaggggatgaagcaaac |
| 2313 | AW291384 | STS-1 | ggctgaagatacccgcttaaggatgctaacatttaccctggtactgccacattttctcta |
| 2314 | BG993697 | SMYD3 | tttcttgaaaacctcctgtagttcctgttgtgtacgggataaaggtgcttaccatggggc |
| 2315 | BI769730 | HLA-DRB1 | cactatcgccgaaatatgcacaatcgcggtgtacgaggagcatacgccacacttatgatt |
| 2316 | BQ632574 | RASA1 | cctccaactaaccagtggtatcacggaaaacttgacagaacgatagcagaagaacgcctc |
| 2317 | BX504817 | SFRS7 | tactggtctgcatcaagtttattcggtagtttgaccgctagtatgttggaagttatttgg |
| 2318 | H53164 | IRF8 | cagcctgagtcagcaccaatcccgcattcagaacctcccagtgaaagggcagccttcatt |
| 2319 | H57732 | TGFBR2 | tttttatatttttcgtcacgttccccctgtagcctggaaagggacggtaacaattaaaga |
| 2320 | L29376 | 3.8-1 | tgtttaaccttatatgtacagtttcacatatgtataaaaacagtagtttgggggcctctt |
| 2321 | M80899 | AHNAK | tgcaaagttgaaaggccctaaatttaagatgccagacatgcacttcaaggcccccaagat |
| 2322 | NM_000038 | APC | ttgccagctccgttcagagtgaaccatgcagtggaatggtaagtggcattataagcccca |
| 2323 | NM_000043 | FAS | accggggcttttcgtgagctcgtctctgatctcgcgcaagagtgacacacaggtgttcaa |
| 2324 | NM_000061 | BTK | tgggggtggaccgaatttggcaagaatgaaatggtgtcataaagatgggaggggagggtg |
| 2325 | NM_000075 | CDK4 | aaatatcagacgtcatattacacatagtatccgccccaaaaccgatgaacacacccagca |
| 2326 | NM_000109 | DMD | gaacatgcattcaacatcgccagatatcaattaggcatagagaaactactcgatcctgaa |
| 2327 | NM_000189 | HK2 | atttcaccaagcgtggactactcttccgaggccgcatctcagagcggctcaagacaaggg |
| 2328 | NM_000237 | LPL | agagagatgatcgtgcctataaatagtaggaccaatgttgtgattaacatcatcaggctt |
| 2329 | NM_000269 | NME1 | cgactaccaccgaacaccttccccgatgtgatcctcaactaaccgacaaaatatacacgg |
| 2330 | NM_000271 | NPC1 | tgactgaactgtgtctaagggtcggtcggtttaccactggacgggtgctgcatcggcaag |
| 2331 | NM_000295 | SERPINA1 | ggttgagtcataccaaatagtgatttcgatagttcaaaatggtgaaattagcaattctac |
| 2332 | NM_000313 | PROS1 | tcaaactgggttattcactgctgcacgtcagtcaactaatgcttatcctgacctaagaag |
| 2333 | NM_000397 | CYBB | attgacatctgagcatactccagtttactaatacagcagggtaactgggccagatgttct |
| 2334 | NM_000405 | GM2A | ccgctttaaggtccataaatatccctaaggaaaaatccaccgtggtacattcagtcctct |
| 2335 | NM_000424 | KRT5 | aagccatgttttatccttttctggagagtagtctagaccaagccaattgcagaaccacat |
| 2336 | NM_000483 | APOC2 | cctgcccgctgtagatgagaaactcagggacttgtacagcaaaagcacagcagccatgag |
| 2337 | NM_000576 | IL1B | gtagcagtgtctgtaaaagagcctagtttttaatagctatggaatcaattcaatttggac |
| 2338 | NM_000579 | CCR5 | aatgtctttccttttgctcttaagttgtggagagtgcaacagtagcataggaccctaccc |
| 2339 | NM_000584 | IL8 | gagttagaactattaaaacagccaaaactccacagtcaatattagtaatttcttgctggt |
| 2340 | NM_000585 | IL15 | agtgatgttgtcttatagtctctatattctattcagtctcggcttgtcttttctagtggt |
| 2341 | NM_000600 | IL6 | actggcagaaaacaacctgaaccttccaaagatggctgaaaaagatggatgcttccaatc |
| 2342 | NM_000626 | CD79B | atgaggacatagtgacgctgcggacaggggaagtgaagtggtctgtaggtgagcacccacg |
| 2343 | NM_000627 | LTBP1 | aatctgtcctggtggaatgggttatacggtttctggcgttcatagacgcaggccaatcca |
| 2344 | NM_000633 | BCL2 | gatattctgcaacactgtacacataaaaaatacggtaaggatactttacatggttaaggt |
| 2345 | NM_000655 | SELL | tatttgcactgtagcctcgccgtctgtgaattggaccatcctatttaactggcttagcc |
| 2346 | NM_000713 | BLVRB | cggataacagcgacaatcgaacgctgaccgcttagaccttcgtgagtagctcggtgtcgt |
| 2347 | NM_000785 | CYP27B1 | ccctaggaaggtgaatctgccctagcctggtttacggtttcttataactctcctttgctc |
| 2348 | NM_000788 | DCK | ctctcacttcgttggtgaccagtttcttaaactgaaagctttaatgttacatagtaaatg |
| 2349 | NM_000853 | GSTT1 | gaagcagaatccaggtatggctggtggggcaagtaaggcgactctacttggctaagcctt |
| 2350 | NM_000877 | IL1R1 | agaatcgattaaattcattaagcagaaacatggggctatccgctggtcaggggactttac |
| 2351 | NM_000917 | P4HA1 | cagacgaatgtcagcgtcacataaaaagagcatgtaggatgggacatattgggatgtatt |
| 2352 | NM_000927 | ABCB1 | agcggctccgatacatggttttccgatccatgctcagacaggatgtgagttggtttgatg |
| 2353 | NM_001067 | TOP2A | cttgcttcaaacggaatgacaagcgagaagtaaaggttgcccaattagctggatcagtgg |
| 2354 | NM_001068 | TOP2B | ccaacaccaactgcaaagtcgactcagagatgtagtctagccatgtgctcaggtacagac |
| 2355 | NM_001110 | ADAM10 | gtacactgtacttctgtgtgcaattgtaaacagaaattgcaatatggatgtttctttgta |
| 2356 | NM_001154 | ANXA5 | ttggtcatgagcatgctagtatgaataaggcaatgtgttaagcactggcatacaaatgca |
| 2357 | NM_001166 | BIRC2 | tggagttcatcagagttatggtgccgaattgtctttggtgcttttcacttgtgttttaaa |
| 2358 | NM_001196 | BID | tcttgctttcctcaaacaggatactgcctgctgtaagaccatcctctatggttgtacttt |
| 2359 | NM_001230 | CASP10 | cctggaactgtattttgaatccttaaaggtgagccctcatagggagatccaaagtcctgt |
| 2360 | NM_001238 | CCNE1 | tgaatttccttatggtatacttgctgcttcggccttgtatcatttctcgtcatctgaatt |
| 2361 | NM_001242 | TNFRSF7 | caggcaaggcacctgaattcccaccgcagagagtgttgtggccgtgaggacttttctgtc |
| 2362 | NM_001254 | CDC6 | cattgtggcattttagactcgttgagtttcttgggcactcccaagggcgttggggtcata |
| 2363 | NM_001350 | DAXX | agaatgttctgggataacatttggaggaaggtgggaagcagatgactgaggaagggatgg |
| 2364 | NM_001425 | EMP3 | gttatagatcttgttcccccccgcacctttcccgccgcgttttggcttcttccctctgtt |
| 2365 | NM_001552 | IGFBP4 | ggcatcttctggcttgactggatggaaggagacttaggaacctaccagttggccatgatg |
| 2366 | NM_001558 | IL10RA | cagaataatgactgacttgtctaattcgtagggatgtgaggttctgctgaggaaatgggt |
| 2367 | NM_001618 | PARP1 | tgggtagtacctgtactaaaccacctcagaaaggattttacagaaacgtgttaaaggttt |
| 2368 | NM_001621 | AHR | ccaagcggcatagagaccgacttaatacagagttggaccgtttggctagcctgctgcctt |
| 2369 | NM_001663 | ARF6 | gaacaataaccattggtgactggagcaggtaattatagcctgcagaaaaaattatctaag |
| 2370 | NM_001706 | BCL6 | tttgggaatgtttgtctcatcccattctgcgtcatgcttgtgttataactactccggaga |
| 2371 | NM_001760 | CCND3 | agggaggcaagccctgttgacacaggtctttcctaaggctgcaaggtttaggctggtggc |
| 2372 | NM_001762 | CCT6A | agaggtaaaaagatgatggaaggtgtggtgactaagggccacggttattgggtgaaattt |
| 2373 | NM_001770 | CD19 | cccaagattcacacctgactctgaaatctgaagacctcgagcagatgatgccaacctctg |
| 2374 | NM_001771 | CD22 | tctcctttggaagtgaggcattgcacggggagacgtacgtatcagcggccccttgactct |
| 2375 | NM_001779 | CD58 | gcattagttttggctgtcatcaacttattatatgactaggtgcttgctttttttgtcagt |
| 2376 | NM_001781 | CD69 | gcaatatgtgatgtggcaaatctctattaggaaatattctgtaatcttcagacctagaat |
| 2377 | NM_001782 | CD72 | aaggattggaagttgactgatgatacacaacgcactaggacttatgctcaaagctcaaaa |
| 2378 | NM_001826 | CKS1B | caaaccgagcgatcatgtcgcacaaacaaatttactattcggacaaatacgacgacgagg |
| 2379 | NM_001827 | CKS2 | atcgcgcgaccagctaaacactcctgcggtcgtatggtcgacaacaatcacacataaaat |
| 2380 | NM_001831 | CLU | gtcagtgtgattcacttaatgatatacattaattagaattatggggtcagaggtatttgc |
| 2381 | NM_001852 | COL9A2 | tgaaggaatagggcggctttccttccagcgagcatcattcggctgttaccaaaacaaaca |
| 2382 | NM_001853 | COL9A3 | ataaaaggttgtgtacaactccacgaggtgaaaaatattcagtaacttgtttacatagca |
| 2383 | NM_001877 | CR2 | cattactgtatatactttgccttccataatcactcagtgattgcaatttgcacaagtttt |
| 2384 | NM_001888 | CRYM | gagatcctcatttatgtttgtagttggaaagcaaagctaggtagccatttcttctgttct |
| 2385 | NM_001894 | CSNK1E | gctatccctccgaattctcaacatacctcaacttctgccgctccctgcggtttgacgaca |
| 2386 | NM_001951 | E2F5 | ttgacttctgacattccactttcctaggttataggaaagatctgtttatgtagtttgttt |
| 2387 | NM_001967 | EIF4A2 | ggactctttacctcgcggcggaagaatatagctgcggagttagttaaacctcgctttccc |
| 2388 | NM_002002 | FCER2 | ccagcggctttgtgtgcaacacgtgccctgaaaagtggatcaatttccaacggaagtgct |
| 2389 | NM_002051 | GATA3 | ttttaacatcgacggtcaaggcaaccacgtcccgccctactacggaaactcggtcagggc |
| 2390 | NM_002095 | GTF2E2 | tttcttcctcgtttgttactttagagcaagtttgcccatagtcttgaatgcaatatttgt |
| 2391 | NM_002101 | GYPC | catcttccagtaactgagcatacccagtgggccaacaagcacgctctaaatacaaaacca |
| 2392 | NM_002105 | H2AFX | ttggtcacgatccccgcctacccaccaatccttaacgcgcctcaccggaccttaacattc |
| 2393 | NM_002120 | HLA-DOB | cctgggtgaggtaaaggacattcatgaggtcaatgttctgggaataactctcttccctga |
| 2394 | NM_002122 | HLA-DQA1 | cctggggtaagccacccggctacctaattcctcagtaacctccatctaaaatctccaagg |
| 2395 | NM_002155 | HSPA6 | gctgtgactgtcagggctatgctatgggccttctagactgtcttctatgatcctgccctt |
| 2396 | NM_002189 | IL15RA | aggtgggagagatgctgagcccagcgaatcctctccattgaaggattcaggaagaagaaa |
| 2397 | NM_002211 | ITGB1 | ccatcttgtttcacactagtcacattcttgttttaagtgcctttagttttaacagttcac |
| 2398 | NM_002217 | ITIH3 | gtgtccacactgactacattgtccccaacctgttttgagtagacacaccagctcctgttg |
| 2399 | NM_002250 | KCNN4 | ggaagaagtgtaactcaccagcctctgctcttatctttgtaataaatgttaaagccagaa |
| 2400 | NM_002305 | LGALS1 | atcaactacatggcggcggatggagacttcaagattaagtgcgtggcctttgagtgaagc |
| 2401 | NM_002350 | LYN | tccaaaaatgcacccaactagctctatgtttacaaatggacataggactcaaagtttcag |
| 2402 | NM_002358 | MAD2L1 | catgttcgtgccagaacatgttacaccactcctacgatggcttgcccgattcgatgcccc |
| 2403 | NM_002426 | MMP12 | ttaagtttgaaaatagttaccttcaaaggccaagagaattctatttgaagcatgctctgt |
| 2404 | NM_002467 | MYC | gccataatgtaaactgcctcaaattggactttgggcataaaagaacttttttatgcttac |
| 2405 | NM_002526 | NT5E | tctgaacagtcactgtaaatcattcttaagcccagatatgagaacttctgctggaaagtg |
| 2406 | NM_002567 | PBP | agggcatttcaaatgacgagaagagctagtaatcacctgcacaaagggcgatggtggcgt |
| 2407 | NM_002646 | PIK3C2B | tatgcctcccgctatggcaaccgaaagaatgcgacgcctggcaagaaccgccggatttct |
| 2408 | NM_002661 | PLCG2 | gtgccctattcacactctgggaagacgctaatctgtgacatcttttcttcaagcctgcca |
| 2409 | NM_002692 | POLE2 | gcctttggatttccacccactgagccctctagtactactagggcatactatggaaatatt |
| 2410 | NM_002738 | PRKCB1 | agagagatccttaacagctagtgcccattagggggctaaacctaaagcctgggtggtgat |
| 2411 | NM_002752 | MAPK9 | atctctgtagacgaagctctgcgtcacccatacatcactgtttggtatgaccccgccgaa |
| 2412 | NM_002832 | PTPN7 | gcttccatggctcaaataataccctgggtatgcaggacccactataccttgcatttgctg |
| 2413 | NM_002838 | PTPRC | gacattcttccttatgattataaccgtgttgaactctctgagataaacggagatgcaggg |
| 2414 | NM_002891 | RASGRF1 | ggcacgcgcaaaggctacctgagcaagcggagttcggacaacacaaaatggcaaacc |
| | | | aag |
| 2415 | NM_002892 | ARID4A | aagttttatatttggtacattactatggatggaatgtcaggtatgatgagtgggtgaagg |
| 2416 | NM_002943 | RORA | ctctagggagacctaataaacacaactgtgttactaattgatgctatactgagctgacaa |
| 2417 | NM_002966 | S100A10 | ctcataccaactatcggcaagaacgcaccgtttccgcacttcatttttaccccgcgcttc |
| 2418 | NM_002967 | SAFB | aatgtgccgtgggttccacgccgtgtgcgcaagttccctgtgtgaaagcacgtctgtctt |
| 2419 | NM_003037 | SLAMF1 | caagctacggaacaggtgggcgcatgatgaactgcccaaagattctccggcagttgggaa |
| 2420 | NM_003088 | FSCN1 | ttgacatcgagtggcgtgaccggcgcatcacactgagggcgtccaatggcaagtttgtga |
| 2421 | NM_003177 | SYK | attgcagagtggcctagagcactctcaccccaagcggccttttccaaatgcccaaggatg |
| 2422 | NM_003217 | TEGT | tactaaaggcacttccttcctgttaaacccctgttaactctccataaatttggtgattct |
| 2423 | NM_003226 | TFF3 | ttcgcctgaccatccacttattctgccacccctgcatggtccccactgcacttaacaggg |
| 2424 | NM_003243 | TGFBR3 | ctgctttgtccaggtgagaacatccataatttggggccctgagttttacccagactcaag |
| 2425 | NM_003254 | TIMP1 | ggaaccctttatacatcttggtcatcttgatctcataacgctggtataaggtggtctggt |
| 2426 | NM_003290 | TPM4 | ggattaaggcccttatgagaagaggccagaacttggttatcctcttccaatgtgaggaca |
| 2427 | NM_003299 | TRA1 | cttgttttggatgccccctaatccccttctcccctgcactgtaaaatgtgggattatggg |
| 2428 | NM_003332 | TYROBP | gtgccatccctgagagaccagaccgctccccaatactctcctaaaataaacatgaagcac |
| 2429 | NM_003362 | UNG | gctgggagcagttcactgatgcagttgtgtcctggctaaatcagaactcgaatggccttg |
| 2430 | NM_003451 | ZNF177 | ctaaatgaaacaacaggggagatacaatattatctggttgcactaatcctgtgctgctta |
| 2431 | NM_003648 | DGKD | tgatgctggatcttgccaagcgcagtcgcagtggtaaattccgcctcgtgaccaagttta |
| 2432 | NM_003656 | CAMK1 | actcacagctgcatgatgaggtagaggtggcccccactctcatagatgtcatccagggct |
| 2433 | NM_003810 | TNFSF10 | tccttaagtcaaaagagagaagaggcaccactaaaagatcgcagtttgcctggtgcagtg |
| 2434 | NM_003875 | GMPS | ctgtggttattcgaacctttattactagtgacttcatgactggtatacctgcaacacctg |
| 2435 | NM_003959 | HIP1R | tttgcccgtcagatttgaacgaatgtgtgtcccttgagcccaaggagagcggcaggaggg |
| 2436 | NM_004049 | BCL2A1 | cctataaggagatttcatattttgttgcggagttcataatgaataacacaggagaatgga |
| 2437 | NM_004073 | PLK3 | cgaatgggttggcttctccaataagttcggctttgggtatcaactgtccagccgccgtgt |
| 2438 | NM_004091 | E2F2 | tttatgagcaccatgtaagcctccttgtattgagataattgggcattaaacattaaactg |
| 2439 | NM_004117 | FKBP5 | gtggttctgagcaaataactacagggtgcccattaccactcaagaagacacttcacgtat |
| 2440 | NM_004126 | GNG11 | cggcagcaatatcacccaagagccataatacacctattataagcgaccagcataataaag |
| 2441 | NM_004184 | WARS | cccctcccaaaaagaaattgataagtaaaagcttcgttatacatttgactaagaaatcac |
| 2442 | NM_004271 | LY86 | gaagcggcaatcagcccgcgcgtggaaccgagacaagtaaacaagacgccagatctct |
| | | | ga |
| 2443 | NM_004289 | NFE2L3 | tggcagccatcctttttaagagtaagttggttacttcaaaaagagcaaacactggggatc |
| 2444 | NM_004322 | BAD | gaggccctgtgcctagcacaaaataagggcataagaaatactagttacatcacaaggtca |
| 2445 | NM_004354 | CCNG2 | ggttgttaaacagtaatagataagtgagacagattgcttgttatttatggtcaaatggtg |
| 2446 | NM_004356 | CD81 | ctttctaacacgtcgccttcaactgtaatcacaacatcctgactccgtcatttaataaag |
| 2447 | NM_004358 | CDC25B | cccactcggtcccagttttgttgccccagaaagggatgttattatccttgggggctccca |
| 2448 | NM_004422 | DVL2 | tcagcctaccagctgctgccatacaggagattgtggccactgtgactctcaccagcagtg |
| 2449 | NM_004445 | EPHB6 | tgcccgggaagtcgatcctgcttatatcaagattgaggaggtcattgggacaggctcttt |
| 2450 | NM_004510 | SP110 | tcccatctttagaagcaatctaccatagttcaccctctggccacagtagttcacatcttt |
| 2451 | NM_004529 | MLLT3 | tattccatcttctccataagtggagaaatgaaaagtaagaacagctcatcttcaaagttt |
| 2452 | NM_004556 | NFKBIE | cttgttttacccatgttgggtcagcctgaaactgccaaccagtaggaagcatggactctc |
| 2453 | NM_004577 | PSPH | agctagccaaaatctgtggcgttgaggacgcggtgtcagaaatgacacggcgagccatgg |
| 2454 | NM_004619 | TRAF5 | gagcaagactgtccttttaagcactatggctgtgctgtaacggataaacggaggaacctg |
| 2455 | NM_004635 | MAPKAPK3 | cttgctgcatttgatcctctacaactggtgttgctcccgttatgcggacagaagacagcc |
| 2456 | NM_004737 | LARGE | tggagaaatgcgagacaatccacgttgctattgtctgcgctggatacaatgccagccggg |
| 2457 | NM_004844 | SH3BP5 | ctttgctatcattctagggctggatttccctaactccagttattctgctgctgccgccat |
| 2458 | NM_004951 | EBI2 | aatgggctttgactggagaatcggagatgccttgtgtaggataactgcgctagtgtttta |
| 2459 | NM_005013 | NUCB2 | gctaatcaaagcggcaacaagtgatctggaacactatgacaagactcgtcatgaagaatt |
| 2460 | NM_005077 | TLE1 | cagaggggccatgggttgtaggattgaggaacggaatctgccgactcacatgacagccca |
| 2461 | NM_005127 | CLECSF2 | tgctatttatactttgagttactcttcaaaagtggtatacctctagtttggagctgtgct |
| 2462 | NM_005211 | CSF1R | actcccccaagctgactcatcctaactaacagtcacgccgtgggatgtctctgtccacat |
| 2463 | NM_005213 | CSTA | gcgggtttggcctcagataagcctccaggtatcattttggctgattgcttctttgctgga |
| 2464 | NM_005214 | CTLA4 | agccaggtgactgaagtctgtgcggcaacctacatgatggggaatgagttgaccttccta |
| 2465 | NM_005271 | GLUD1 | gggccttttgaacagtagtgtccccatgaagtgctagataatatatgtgtaagagtcagc |
| 2466 | NM_005292 | GPR18 | tcaggctcgagtcattagtgtcatgctataccgtaattaccttcgaagcatgcgcagaaa |
| 2467 | NM_005347 | HSPA5 | ccttacctcaaaggctctcactaccgtggaccacctagtctgtaactctttctgaggagc |
| 2468 | NM_005348 | HSPCA | ccctgtagttgacaattctgcatgtactagtcctctagaaataggttaaactgaagcaac |
| 2469 | NM_005415 | SLC20A1 | ttcgggcaagttaaatgggacagccttccatgttcatttgtctacctcttaactgaataa |
| 2470 | NM_005449 | TOSO | cagccccctgtagttgacaggtaagctgtaggcatgtagagcaattgtcccaatgccact |
| 2471 | NM_005461 | MAFB | gtgcactggtaagcagacactgcactgaaccaactgctatgctcagaatgtaccagaaac |
| 2472 | NM_005531 | IFI16 | tgaaactcacctgctttgaattggcaccgaaaagtgggaataccggggagttgagatctg |
| 2473 | NM_005582 | LY64 | gcgacagcattgattctcttagccatcttaagggaatctacctcaatctggctgccaaca |
| 2474 | NM_005601 | NKG7 | ctcgtccactcccccgctatccaacgtcacatctaagcactatgacatgcaccgaccgaa |
| 2475 | NM_005606 | LGMN | actgcttcaactggcactcccccacgtacgagtatgcgttgagacatttgtacgtgctgg |
| 2476 | NM_005610 | RBBP4 | ccattgctctgcatctctagcccactttatatcctgccaccagtacttcttgtaatccca |
| 2477 | NM_005623 | CCL8 | ctgtctgtagtgttgtggggtcctcccatggatcatcaaggtgaaacactttggtattct |
| 2478 | NM_005638 | SYBL1 | ctgaataaaattgatgtgcatgttttagggatcaattacctaactgttccttggtctatt |
| 2479 | NM_005652 | TERF2 | tatgtaggcaggttaatcctccacttctcatgtggttgaaccagtgtgttttttggtaaa |
| 2480 | NM_005658 | TRAF1 | taacctcttgatccctactcaccgagtgttgagcccaaggggggatttgtagaacaagcc |
| 2481 | NM_005856 | RAMP3 | agacgaggttctcatcccgctgatcgttatacccgtcgttctgactgtcgccatggctgg |
| 2482 | NM_005935 | MLLT2 | tgtagtcatatctgagcataagaccttgatgtgtgattcctgatgaccggtttcatttat |
| 2483 | NM_005950 | MT1G | aatacaaagatctcggattatccatcacctcttgtacaattacaccccaagtccctcgtc |
| 2484 | NM_006006 | ZBTB16 | ttgcggctgagaatgcacttactggctcattcagcgggtgccaaagcctttgtctgtgat |
| 2485 | NM_006014 | DXS9879E | tacaacacaacaccagcgcccaatatacgcgaatgaggcgccctatacccgcctctccac |
| 2486 | NM_006115 | PRAME | tgtcctgagtctaagtggggtcatgctgaccgatgtaagtcccgagcccctccaagctct |
| 2487 | NM_006162 | NFATC1 | gtacaattagttgcttattacgtatgattactcacagcgatctattgttccatataacca |
| 2488 | NM_006164 | NFE2L2 | atcctcatttataaacctggggtttgaactgcggtctccacgatcactgtcagctctcct |
| 2489 | NM_006195 | PBX3 | acagctttattacctcatgcgaactcatacaaaccaatagaatttcaacatgttctgtag |
| 2490 | NM_006218 | PIK3CA | ggggatgatttacggcaagatatgctaacacttcaaattattcgtattatggaaaatatc |
| 2491 | NM_006254 | PRKCD | gccttcggagggaaattgtaaatcctgtgtttcattacttgaatgtagttatctattgaa |
| 2492 | NM_006257 | PRKCQ | ctcagccgcagacaagtaatcactaacccgttttattctattcctatctgtggatgtgta |
| 2493 | NM_006317 | BASP1 | ttagcctacctagatttctcatgacgagttaatgcatgtccgtggttgggtgcacctgta |
| 2494 | NM_006332 | IFI30 | aagaagtccaatgcaccgcttgtcaatgtgaccctctactatgaagcactgtgcggtggc |
| 2495 | NM_006475 | POSTN | atactggaaaccatcggaggcaaacagctcagagtcttcgtatatcgtacagctgtctgc |
| 2496 | NM_006498 | LGALS2 | gccacgagggaactggcttacgctgttggcacatttccttccagacggttctccacagat |
| 2497 | NM_006558 | KHDRBS3 | aagcttccatcagccaccgaatgcttaagaactcatctaagccagtcctctcattgattg |
| 2498 | NM_006620 | HBS1L | acactaccaaactgtcagtgaacccgccgttattaaacgattgattagtgtcttaaacaa |
| 2499 | NM_006644 | HSPH1 | gtcatgaatgctcaggctaaaaagagtcttgatcaggatccagttgtacgtgctcaggaa |
| 2500 | NM_006734 | HIVEP2 | tcgatgagaatatgacccaaaggacactggtcaccaacgcagccatgcaagggataggat |
| 2501 | NM_006763 | BTG2 | aaacaggtccctgcctttttagaagcagcctcatggtctcatgcttaatcttgtctctct |
| 2502 | NM_006841 | SLC38A3 | ttcagctggctgcggcatgtgcttattgccgttggcctgctcacttgtatcaacctgctg |
| 2503 | NM_006889 | CD86 | actcctagcacctggctagtttctaacatgttttgtgcagcacagtttttaataaatgct |
| 2504 | NM_006892 | DNMT3B | ggaaccgtgaagcacgaggggaatatcaaatacgtgaacgacgtgaggaacatcacaa |
| | | | ag |
| 2505 | NM_006986 | MAGED1 | ttatgttcacagatattgctatcaatcgcagtagtctttcccctgtgtgaggctgaagcc |
| 2506 | NM_007311 | BZRP | tgtctagcgggctcctcacactcaacatgtcctaaatgctgggtatcgcatgaagcactg |
| 2507 | NM_007360 | KLRK1 | acaggttcacagttaagaaggaattttgcctctgaataaatagaatcttgagtctcatgc |
| 2508 | NM_007361 | NID2 | ggccagtttactgatgagtatctcccagaacaacgatctcacctctacgggataactgca |
| 2509 | NM_012203 | GRHPR | tatatgtacttgtcacattggtgttggacacatttgcgccaaaagtatggtaattctatt |
| 2510 | NM_012448 | STAT5B | tccagcaaccctggttggggggtcagacttgatacactttcaggttgggagtggacccac |
| 2511 | NM_012452 | TNFRSF13B | catcagcccatctccagcgctgtcccaattacagccctagcaagtggagacaacaagaag |
| 2512 | NM_013230 | CD24 | aaaaatagacactccccgaagtcttttgttcgcatggtcacacactgatgcttagatgtt |
| 2513 | NM_014246 | CELSR1 | ataaaaaactctagtccctttaaacgtttgcccctggcgtttcctaagtacgaaaaggtt |
| 2514 | NM_014257 | CD209L | gaaatgagaacacggggtaactgcgatcattgcacttggtgttcacagtgggccaggcac |
| 2515 | NM_014338 | PISD | tgcaggagagacatcattgaattttttcaactgtatcagtagcacagtatttttgtatga |
| 2516 | NM_014456 | PDCD4 | catgtttattatctaatcattccaagttttgcattgatgtctgactgccactcctttctt |
| 2517 | NM_014686 | KIAA0355 | tgtgagactgtgtgaagccgtttgtgtggtctccatgtaggtgctgtgttcccggcaccg |
| 2518 | NM_014762 | DHCR24 | gatgaatggttaacacgagctagttaaacagtgccattgttttgccagtgaagcctccaa |
| 2519 | NM_015187 | KIAA0746 | agtggtttcgactggatatctcttttaacggaggccagatagtagtaaccactagcattg |
| 2520 | NM_015641 | TES | agccacccatttgcttttaatccaaagaacatgtatagtttttgtacccagagactatga |
| 2521 | NM_015866 | PRDM2 | taatgatgcgcttttgtcccgtaaatgttaacactcatgaagcataccccggcctctcag |
| 2522 | NM_016076 | PNAS-4 | agggaattctggttttagtccattggtagcattgtgtgtatgaggagattcaacaccaca |
| 2523 | NM_016081 | KIAA0992 | cagtcgctatgcagcactttcggaccagggactagacatcaaagcagcgttccaacctga |
| 2524 | NM_016187 | BIN2 | atagacacagacacttgcctatacagagacataaccacacacactcagaggatagtgaac |
| 2525 | NM_016336 | UBE2J1 | tcatcaacctacccaacctgtagctaagaatacctccatgagccctcgacagcgccgggc |
| 2526 | NM_016628 | WAC | aactggtatatgtcaggctttcccaatagcttaactgtgaccctatacggatggcttttt |
| 2527 | NM_017530 | LOC55565 | gtcattgggtcgccacctcttaatccactcggaggaccagcgatctaactgtgctgtgtg |
| 2528 | NM_017784 | OSBPL10 | ctactgtgagtgcgaggagaagagactgtgcgtcaacactcatgtatggaccaaaagcaa |
| 2529 | NM_017935 | BANK1 | ttctgaatttctcacattcagagttccagtcattattgttacatcatgtttgcagaaacc |
| 2530 | NM_017955 | CDCA4 | atctgaatccatgtcattcataaccccttgatctgtagtgtcatgggtgctgccgcaggc |
| 2531 | NM_018442 | IQWD1 | tattttaattaactgtcgacgtgctgccacgtctgttgctatttgcccaccaataccata |
| 2532 | NM_018842 | BAIAP2L1 | tcatgcttctctgtttcacgtagttgggttgacaagtttctgcctttaagataaatgagt |
| 2533 | NM_020151 | STARD7 | atgcacaagtgcgaaggagttgcggttgctccatgttctgacttagggcaatttgattct |
| 2534 | NM_020199 | C5orf15 | ggtcttggcgctcctgcttgtgtccgccgctctatccagtgttgtatcacggactgattc |
| 2535 | NM_020529 | NFKBIA | atgaacggtccatgccgataagtaaacgtcgaacaattgcccttcaaccactccctctaa |
| 2536 | NM_020992 | PDLIM1 | gtcccagagccaggttgtgaaggttttccttcactgcggagcccttaggttatgaacatg |
| 2537 | NM_021813 | BACH2 | agaaaagtctcattgtggcagattgagcataaattattcaactgacggtgcaaaaacatt |
| 2538 | NM_021822 | APOBEC3G | agtttcaaacctactaatccagcgacaatttgaatcggttttgtaggtagaggaataaaa |
| 2539 | NM_021950 | MS4A1 | cttagagttaccacaccccatgagggaagctctaaatagccaacacccatctgttttttg |
| 2540 | NM_021966 | TCL1A | tgcctgtagcccactctgctcgccttagcactaccactcctgcccaggaggattccattt |
| 2541 | NM_022552 | DNMT3A | aaccacagaggcggaaataccggagggctttgccttgcgaaaagggttggacatcatctc |
| 2542 | NM_023037 | 13CDNA73 | tgcttgagcaccagacaagcttggtatcttctgaggacggtgcccgagagcaggagaaca |
| 2543 | NM_024708 | ASB7 | aggtaccacaccgcttcagctcgccattatccgagagaggtcaagctgtgtgaaaatcct |
| 2544 | NM_025113 | C13orf18 | tgtggaactccagtagagcctagtaagtacggataatggatcgcctgcttatgatgtgat |
| 2545 | NM_025216 | WNT10A | tgtgagtaagcgagacacaacacttgtcctcttggaggttacattcttgctggggggagg |
| 2546 | NM_030666 | SERPINB1 | agagttacactctcaactccgacctcgcccgcctaggtgtgcaggatctctttaacagta |
| 2547 | NM_030764 | SPAP1 | tggtgtggaaaattacctggtgttgtagcgaagtagccatttccattctaacccagtcct |
| 2548 | NM_030775 | WNT5B | aagtccaaggtcatctctggcccagtgaccacagagagatctgcacctcccggacttcag |
| 2549 | NM_031305 | ARHGAP24 | ttcatatcttttcacctatttccagtccttatcatagttgataaaaacctcagactcatc |
| 2550 | NM_031942 | CDCA7 | taggtaattattgcagattgatgtctctcaatcccatgtattgcgcttatgttacaagtt |
| 2551 | NM_032991 | CASP3 | acgggagatttcttgttgctcaaaaaatgagctcgcatttgtcaatgacagtttcttttt |
| 2552 | NM_033208 | TIGD7 | catattgtccgttttccggtattgagttagggaaagtatgcaggtattcctgtcattcct |
| 2553 | NM_033274 | ADAM19 | agatcgccaactatgttgataagttttaccgatccttgaacatccggattgctctcgtgg |
| 2554 | NM_057735 | CCNE2 | gctttcttgacatgtaggttgcttggtaataacctttttgtatatcacaatttgggtgaa |
| 2555 | NM_078467 | CDKN1A | accctgtactgttctgtgtctttcacagctcctcccacaatgctgaatatacagcaggtg |
| 2556 | NM_079421 | CDKN2D | gttggaagcttgttttccagtctcttgtacagcgttttaaaagaaatggattctatttat |
| 2557 | NM_080593 | HIST1H2BK | gtgtgggccgtaaaaggaagggcaaaagctacactttagaatgcacgaggtccatctttc |
| 2558 | NM_138340 | ABHD3 | caattgatgattattatactgatgccagtccgagtcctagactgaagtcagtaggaattc |
| 2559 | NM_138379 | TIMD4 | cccaaaaaagaggccggagtgagagggagtgactattaacggcgggcgaaacgaaaa |
| | | | taa |
| 2560 | NM_139207 | NAP1L1 | tcctttctgagaagttagtgttaaggtcttggaatgtgaacacattgtttgtagtgctat |
| 2561 | NM_139276 | STAT3 | taatccctgaaacgggcttcaggtcaaacccttaagacatctgaagctgcaacctggcct |
| 2562 | NM_144646 | IGJ | atgcctgctatcctgactaatttaagtcattgctgactgcatagctctttttcttgagag |
| 2563 | NM_145804 | ABTB2 | ctagagctgtttgttcaatcactgatgggcaaaggggagatgtagctaactggtggccct |
| 2564 | NM_152785 | GCET2 | tagtactcttcagcagagttccctgatggccttgtacagagaacccgatgattgatgagg |
| 2565 | NM_172373 | ELF1 | gggctaatctggctgagtagtcagttataaaagcataattgctttatattttggatcatt |
| 2566 | NM_173624 | FLJ40504 | cagctttaacaaaaaattggccgtcaaaacctgagtcctgtcctcttgccctcctccccg |
| 2567 | NM_175870 | LOC90925 | aaaggaactcctgtcataaacattggatttcccgcggagtaacctggcgacatatttaga |
| 2568 | NM_177968 | PPM1B | gcagcgtgatgatacaacgtgttaatggttcattagcagtatctcgtgctctgggggact |
| 2569 | NM_181443 | BTBD3 | atagctgctgtgcaaattggtagaccttataagaaggcacttgtttgtaagccagagaag |
| 2570 | NM_181838 | UBE2D2 | aagagcacagtcttgtttggagagtctacataattactttgcactaacatttgcaggatg |
| 2571 | NM_182746 | MCM4 | cagagtgaatgttacaggcatctatcgagctgtgcctattcgagtcaatccaagagtgag |
| 2572 | NM_182776 | MCM7 | tctggcaggtcaatgcttcccggacacggatcacttttgtctgattccagcctgcttgca |
| 2573 | NM_198833 | SERPINB8 | aaccatacatcatctatgctttgtagtatgactcctgtcactcagtacaattattttgag |
| 2574 | NM_201593 | CACNB2 | ccacaacgagtgcaacaagcagcgcagccgtcataaatccaaggatcgctactgtgaaaa |
| 2575 | R99527 | MGC39372 | tccactgggtcaaaccatacatcgcttcgtctctgtagtgatgacttcctgtcctctgct |
| 2576 | T66903 | LOC54103 | catcctcggggtccagtgtctccctttgcataacctgctgcattgcattgacagtggagt |
| 2577 | U37028 | ITGAD | ctagaagaagacgaggtctacaatgccattcccatcatcatgggcagctctgtgggggct |
| 2578 | W56129 | SFRS9 | gttgctctactatggagatcaacagttactgtgactgagtcggcccattctgtttagaaa |
| 2579 | X58529 | IGHM | atgttaaccctgccgcgtggaatccccccgggaatcgaaattccgaacccaatgcagtcc |
| 2580 | AA188785 | LOC286025 | ttcctccaggtttttcaggggtcacttcacatttctaaagaaagagtgaataggctgggc |
| 2581 | AA347638 | BCR | aacttagagtctaaaagatttctactggatcacttgtcaagatgcgccctctctggggag |
| 2582 | AA601122 | SECTM1 | caagaggggcgcgtttgtgtctcgggttaaaataaggttccgtccgcgtgctgggtcaga |
| 2583 | AA642467 | SLC2A14 | gtcaaacatcacgaagacattggatgtggccccctgtgctgtggtcgcttcttggtcttg |
| 2584 | AA682722 | LARP | acacgtctaccataagtatcgtaggcgctgccttaatgagcggaaacgcttgggcattgg |
| 2585 | AA757235 | LOC399933 | ttggtatgtagaaatatatctgatttgcatactggtcctttatccagcaaccttcttaaa |
| 2586 | AA765313 | FZD3 | ttgcatgactgatagctgtaactcacagttaacatgctttcagtcaagtacagattgtgt |
| 2587 | AB002310 | HUWE1 | accgcactgtgttaaaccagatcctacggcagtccacgacccaccttgctgatgggcctt |
| 2588 | AB002333 | ZNF518 | gccatatcaggaaaataatgtcgagatatgtacttcttgcctttaagttttaacagccat |
| 2589 | AB024402 | ING1 | cgacttgcagagaaatgtctcgctgatgcgggagatcgacgcgaaataccaagagatcct |
| 2590 | AB028952 | SYNPO | ttgagaaaccggcagttcccaagccagcgcctggctgttctctcattgtcactgccctct |
| 2591 | AB032991 | NDFIP2 | gcgggtcgagtgctgtagttcgatttttgcgtgtgtgcgttgcttgcggcctttgtgcct |
| 2592 | AF008915 | EVI5 | gatgctatttatgatccaagtttttacatcacatccattgatctgcctatcccttctttt |
| 2593 | AF108138 | C15orf20 | tgcaaaatgtgcacccatattttaagctgctttttcaggggataaatagtgtttggggac |
| 2594 | AF116668 | LMO2 | aagggatttcttaggggatggtagacctttattgggtatcaagacatagcatccaagtgg |
| 2595 | AF143327 | FLJ32810 | tcaaagcttaacttctgtaggttccaaggagacacccaaagcttcaccaaacccagacct |
| 2596 | AF200348 | D2S448 | gacagagctataaactcaacccgaacacatttgtttgacagccgtcctcgttctccaaat |
| 2597 | AF245480 | MONDOA | ggagatatttctgtaactcattctcttggtgctcacgattgccatggccatagggccaca |
| 2598 | AI075159 | SPTA1 | ttgatgagcggacaaagcttggagactatgccaacctaaaacaattctaccgagaccttg |
| 2599 | BU948323 | TCF4 | cttcgtctgaaaaatgccaatattcaatcatcatgcagcattataacaagccttataagt |
| 2600 | AI675029 | C7 | gttttcagggagtacacaggtagattagtttgaagcattgaccttttatttattccttat |
| 2601 | AI694012 | PSMA5 | agtcaatacctgttagtgttaggctattaacaatagttaggtgaaaggtaatgagggcat |
| 2602 | AI732248 | COL4A1 | tactacgcaaacgcttacagcttttggctcgccaccatagagaggagcgagatgttcaag |
| 2603 | AJ007509 | HNRPUL1 | cttttattccgggcgtcttggtagtttctggtgggattcagtgggtgagagggaagaagg |
| 2604 | AK022224 | ACTN1 | tttctccaatctcatgtccattttggtgtgggagtcggggtagggggtactcttgtcaaa |
| 2605 | AK023928 | PSCD1 | gcacctgggtcagtattagtctatttatcagaggtgtaaataatctatgtatagtttttc |
| 2606 | AK024580 | NRP1 | tcacatttgcatcatagacgagacagtccattcatcttagttaaattggattgagaatgc |
| 2607 | AK025005 | MARCH1 | cttagctgggtcttccactcctaacggaattgagctcgttgatctgggatccaaaggtaa |
| 2608 | AK091853 | COL3A1 | cctcctgggattaatggtagtcctggtggtaaaggcgaaatgggtcccgctggcattcct |
| 2609 | AK126650 | CAPZB | agggacctacacacagaggagtgaacttagggttctagggactatggccgggtcaccggt |
| 2610 | AK127124 | ARHGEF4 | tatccacttgcctggtagaagtagcttgaaggtgagagagataaacaattgtcctcttcc |
| 2611 | AK127132 | DRG1 | ctagcagcttcaacccagtcctccttaccttgcacctattaacgttggttcaacatgaag |
| 2612 | AK129940 | GNAI1 | gaaaaggttagtctttcagtacacgttactggtaagtagtttccaagttacgtgttgtca |
| 2613 | AL049313 | CLIC5 | ggaagaaagtccatgagactttctgactaggaaaccatgtggtttgaacttgaagaaaaa |
| 2614 | AL049327 | CBLB | catgctaattcactctagttcaaatccacattctagttgaatccctgcaatgtaacttga |
| 2615 | AL049449 | GAB1 | ctgtggatttaaacaaattgcgaaaagatgctagttctcaagactgctatgatattccac |
| 2616 | AL050391 | CASP4 | catgatgagggatgggatgaaggcagcaaggggtaaccatcttgaccttctgttttttct |
| 2617 | AL137527 | LRCH3 | ccaactgcgtaaacatattgagtaccggttgaaagtgtctctaccttgtgatctcggagc |
| 2618 | AL353942 | SEPT11 | tctaattggatgtgctttcgcctttgcatgtaagtacggtagtaagaaacctttgagatc |
| 2619 | AL833915 | TDRD9 | agatgaaaacccccatgatggtgaattgaccttcttaggaagagttttagcccaacttcc |
| 2620 | AL834278 | USP30 | gaaagcattcattatgtccggagtgtctttttactcatctgatacaggtaattaaaagaa |
| 2621 | AU252485 | MAP7 | tccaccatgaatctttcgaaatatgttgatcccgtcattagcaagcggctctcctcttca |
| 2622 | AV650179 | PRG1 | tccaacaagatcccccgtctgaggactgacctttttccaaagacgagaatccaggacttg |
| 2623 | AV686223 | KIAA1407 | aaatacatgctgacgtggttccagcgtagtcaggaaagtctggctagaaagatggcccag |
| 2624 | AW014009 | MAIP2K3 | agttgtgtgaataccccaagactcccatgagggagatgccatgagccgcccaaggccttc |
| 2625 | AW190768 | SLC13A3 | cacccccttactctgctataatttctccttaataggacactgtataacttattttcttat |
| 2626 | AW292143 | GFAP | catagtgaccggctgcttttccctaagccaagggcctcttgcggtcccttcttactcaca |
| 2627 | AW439398 | CCND1 | gccaccacggcgttgtacctgtaggactctcattcgggatgattggaatagcttctggaa |
| 2628 | AW452039 | HRMT1L3 | gtttgctccaccagatttaaccaaatgtaactcccacattgagtttatctatattgaaaa |
| 2629 | AW664012 | ALOX5 | gttcacacctgatttttaagacttagaataaggaggtggggaatgtgaaatatctcattt |
| 2630 | AW967479 | CD38 | acaaataagcgagaaccgcgacgagcaccacataagccgtaggaccgcatgaaagaa |
| | | | gag |
| 2631 | AW970654 | PHTF2 | aaacattaccctaatgaggacgcccctaaatcgggtactagttgcagctctcgctgttca |
| 2632 | BC028066 | NALP1 | accaggaaccaccttggcaagatatttacccaccggccatctctgtttactcatgaatgt |
| 2633 | BC034289 | LOC87769 | acttactcttcaacttaatggcagactgtgatcgctaactgcatctggcacaaaaacatg |
| 2634 | BC042366 | PCDH9 | gtgtttaaagagggtcaagtggaggtgcatattccagagaatgctcccgtaggtacctct |
| 2635 | BC045532 | LSM8 | tacttggagatagtcacattagtacataggtgtcctttgcaactgctgtcaactctacat |
| 2636 | BC050383 | TMPO | ggggagataaatcagacttaacatgtatgtaagatcaattcacttaaaagtatggtccaa |
| 2637 | BC050602 | HIST1H2AC | tggtaagtgaactgaaaattccagtcactcttgggctagactcaacgttcttaaaaacta |
| 2638 | BC058855 | VEGF | ttaacatcacgtctttgtctctagtgcagtttttcgagatattccgtagtacatatttat |
| 2639 | BE147267 | ECE1 | agcaggggactgatggctatagcagaatgaggtcgggtcaggaccctcaaacaccatctg |
| 2640 | BE549606 | BZW1 | ttaactgaaaccggtactgatttggaagcagtagctaagtttcttgatgcttctggagca |
| 2641 | BE798965 | LAMC1 | acttacgtacgtggcataacacatcgtgtgagcccatgtatgctggggtagagcaagtag |
| 2642 | BE927772 | SFRS3 | tatccacctggtacctaagtcttgtcatggacttacaggtttgcatgggttccaaatact |
| 2643 | BF055235 | RIPK1 | tgagttctgtttgctccttgtaccaccatccaaatggtgttatcaaatctcttagattcc |
| 2644 | BF513638 | WNT3 | ttttagttctctagggtctgataggaacagacctgaggcttatctttgcacatgttaaag |
| 2645 | BG682263 | HDAC3 | taagagtggcttgggatgctgtgtcccaaggaatttcttttcacctcttggaagggctgg |
| 2646 | BG683220 | PMS2 | gacctctttgataggaatgtttgatagtgatgtcaacaagctaaatgtcagtcagcagcc |
| 2647 | BG747999 | MT1L | ccacggagaatacaacaacgatgcggcacgaggaaaagctggagtcagggaacaacc |
| | | | aga |
| 2648 | BI493513 | PHF8 | ggggttgggagtgttagtaatcaaggtttagaacaccatgagatagttacccctgatctc |
| 2649 | BI559738 | GPR56 | tggttaattctgtccaacaaacacacacgggtagattgctggcctgttgtaggtggtagg |
| 2650 | BM709325 | BCL7A | cccacttctctatgtaacgatataagctatcggagggtggtaccgatcaggaacgctttt |
| 2651 | BM711190 | MED28 | atctcttctgttgccctcgctaggttctccctggtgggttagtgctttgtatctgtctct |
| 2652 | BM727177 | GOLT1B | tttccagttgcactgtatctctggaagtgatgcatgaattcgattggattgtgtcatttt |
| 2653 | BQ009245 | GPM6B | atatgtcacactccttaatagggacctgtgactccttaataaggacctgtgacatgccca |
| 2654 | BQ021469 | AGPS | gattccctggagttcagtactgtaggaggatgggtatctactcgcgcatcaggcatgaag |
| 2655 | BQ215285 | LEF1 | acctaacaaaggcgtaggagtaacctcgcactttgctagctaacctgactccgggtgagg |
| 2656 | BQ898221 | ITGA6 | tcagtattcgggagtaccttggtggatcatcctagtggctattctcgctgggatcttgat |
| 2657 | BU929213 | SESN3 | aatgtaaggcagatgacgtgatctttaagactgctatatatatcagtctcttactctata |
| 2658 | BU954396 | RPL11 | aggctgcattggggccaaacacagaatcagcaaagaggaggccatgcgctggttccag |
| | | | ca |
| 2659 | BX095432 | CNTN5 | ttaagccttcgcagtttccacgtggcattgagcgttcgagtgcacagaactagaagtcaa |
| 2660 | BX640908 | EVI1 | aatccagtgctatccagtccataagccacgtatgacgttatcaaggttgaccagagtggg |
| 2661 | BX648339 | USP53 | gatcatataaacatgaccgagttgtacctcagagtcgagcttctgcacaaataataagtt |
| 2662 | BX648365 | SEPT7 | ctgctaaaatagaatatagcatctttcatatggtaggaaccaacaaggaaactttccttt |
| 2663 | BX649193 | TKT | tgtggcttgttctgcccatgtagactcaggtatatgaggacgttctgagtgggggtttgg |
| 2664 | C05886 | ETV6 | aatccacccggcgtgactcatttcaacactaagtactaggggtgttgtcaggagacaaat |
| 2665 | D31762 | TRAM2 | tcttatcttccatggatgctttaattggaagtgggttgccgacccccttgtgcctagaaa |
| 2666 | D86967 | EDEM1 | ttagccacatggtgagaccgtggtgaaagggggatggaaattgcttggccagtctttgcc |
| 2667 | H41942 | NPEPPS | catttctgggaatggttaaacacaaaaggctgatagctggtatcacatagttggagtcag |
| 2668 | M60028 | HLA-DQB1 | agggggcaaaggggagaacccccacatggtgaagaacttttcccgcgcactttttaaagg |
| 2669 | M77810 | GATA2 | ggctaggacagggtctcggactagggaagtggtttctctgcttaaaaagggtcagggtgg |
| 2670 | N26272 | MSI2 | ttgaatataagattcccaaacagaggagcataacacattcctagtacctaagttccaggt |
| 2671 | N28431 | COL6A1 | cctcagaatagtgatgtgttcgacgttttatcaaaggccccctttctatgttcatgttag |
| 2672 | N41620 | WWP1 | ctgtacagtgaattttccgaacctctcaaagtatgttttccgttcttccacagaaatatg |
| 2673 | N53163 | COL27A1 | tttgccatcagccgggtccagatgaatttcctgcacctgctaagctccgaggtgacccag |
| 2674 | N54946 | EWSR1 | aagcagtctgtcggatcctgtggggatagacgggcatttccctcgttgccccccttttta |
| 2675 | N70000 | UBE3B | ccctcattagcggattccgttccattatcaaacccgagtggatccgaatgttctcaactc |
| 2676 | NM_000016 | ACADM | gatttatgaaggtacttcacaaattcaaagacttattgtagcccgtgaacacattgacaa |
| 2677 | NM_000022 | ADA | cgccttcgacgagcccaaagtagaactgcatgtccacctagacggatccatcaagcctga |
| 2678 | NM_000024 | ADRB2 | ggaagtttacatcctcctaaattggataggctatgtcaattctggtttcaatccccttat |
| 2679 | NM_000033 | ABCD1 | attggattccctattcgtagccatctccgtggccaatgtgactaccgtgccagcagcggg |
| 2680 | NM_000062 | SERPING1 | tcatggagaaattggaattcttcgatttttcttatgaccttaacctgtgtgggctgacag |
| 2681 | NM_000089 | COL1A2 | cttttgccgtataaatagggcagatccgggatttgttattttagcaccacggcagcagga |
| 2682 | NM_000099 | CST3 | ttgaactcaggaaaccctcaaataggccagaacaactcactaattaaattcatcccctcc |
| 2683 | NM_000110 | DPYD | ggctttaaatcctcgaacacaaactcatgcaactctgtgttccacttcggccaagaaatt |
| 2684 | NM_000118 | ENG | catgtccttgatccagacaaagtgtgccgacgacgccatgaccctggtactaaagaaaga |
| 2685 | NM_000120 | EPHX1 | ccttttgagctattgcacacgcctgaaaagtgggtgaggttcaagtacccaaagctcatc |
| 2686 | NM_000147 | FUCA1 | gtcagtgcaaaaacaatgccagagctgtacgaccttgttaacagctataaacctgatctg |
| 2687 | NM_000169 | GLA | ctatgataaaccggcaggagattggtggacctcgctcttataccatcgcagttgcttccc |
| 2688 | NM_000182 | HADHA | gaaaaattgacagcgtatgccatgactattccatttgtcaggcaacaggtttacaaaaaa |
| 2689 | NM_000194 | HPRT1 | gcagtcaattttcacatcaaagacagcatctaagaagttttgttctgtcctggaattatt |
| 2690 | NM_000214 | JAG1 | ggaacaagttgagctatgacttaacatagccaaaatgtgagtggttgaatatgattaaaa |
| 2691 | NM_000234 | LIG1 | ttgctttttagcaaatctgctgtggcaggctgtggattttgagagtcaggggaggggtgt |
| 2692 | NM_000239 | LYZ | ggagtaggaattaagtgaaaggtcacactaccattatttccccttcaaacaaataatatt |
| 2693 | NM_000246 | MHC2TA | tttgtcacacactttggctattagagatcaaccccttcgctcctgtgtcttgcaatggca |
| 2694 | NM_000249 | MLH1 | tggagggactgcctatcttcattcttcgactagccactgaggtgaattgggacgaagaaa |
| 2695 | NM_000251 | MSH2 | tgttgcagagcttgctaatttccctaagcatgtaatagagtgtgctaaacagaaagccct |
| 2696 | NM_000277 | PAH | ctgcacctaatccccataacttccagtatcattttccaattaattatcaagtctgttttg |
| 2697 | NM_000305 | PON2 | gaaagctgctttcgaataaagtgaatacattttgcacaaagtaagcctcacctttgcctt |
| 2698 | NM_000341 | SLC3A1 | ttcgggccttcccgctaaaataagaataaggttaagtaccaattctgccgacaaaggcag |
| 2699 | NM_000361 | THBD | agtgggttacgggagacaacaacaccagctatagcaggtgggcacggctcgacctcaatg |
| 2700 | NM_000382 | ALDH3A2 | tcataaaattggcatcaattttaatgacgctcctggtatggaacctcagatataccctat |
| 2701 | NM_000395 | CSF2RB | acctccagtcccttgagaccccacgtcatgtagagaagttaacggcccaagtggtgggca |
| 2702 | NM_000417 | IL2RA | cgtacgtttcctgagaagtgtctaaaaacaccaaaaagggatccgtacattcaatgttta |
| 2703 | NM_000418 | IL4R | agggaaggcgggaaccttgggttgagtaatgctcgtctgtgtgttttagtttcatcacct |
| 2704 | NM_000435 | NOTCH3 | tgactgggatcccgtgtaccgagtacacgacccaggtatgtaccaagtaggcacccttgg |
| 2705 | NM_000448 | RAG1 | tagggcaaccacttatgagttggtttttgcaattgagtttccctctgggttgcattgagg |
| 2706 | NM_000484 | APP | gccaggcctcatacatactatttactggttctctttctgcgggtgctccaccaagaattc |
| 2707 | NM_000485 | APRT | ccgggtaggtgatgggtaacattccttaaatggtgcatgtcactggcctttcagctggga |
| 2708 | NM_000536 | RAG2 | tcaagcaaccctttggattatgcccatgaacaagttagtttctcatagctttacagatgt |
| 2709 | NM_000546 | TP53 | atctcttgtatatgatgatctggatccaccaagacttgttttatgctcagggtcaatttc |
| 2710 | NM_000561 | GSTM1 | ataagaagaactgtgcggcacagcgcccgctactacagctcgtcacacggtgttgtccga |
| 2711 | NM_000574 | DAF | atattgaagagttctgcaatcgtagctgcgaggtgccaacaaggctaaattctgcatccc |
| 2712 | NM_000578 | SLC11A1 | ccattgtgggctccgacatgcaggaagtcatcggcacggccattgcattcaatctgctct |
| 2713 | NM_000594 | TNF | caggggagttgtgtctgtaatcgccctactattcagtggcgagaaataaagtttgcttag |
| 2714 | NM_000598 | IGFBP3 | acactcagcgggcctaggcacgcgtggctcttgttgccttagctgaaatttctgttgtgc |
| 2715 | NM_000601 | HGF | ctacactggattgatcaactatgatggcctattacgagtggcacatctctatataatggg |
| 2716 | NM_000604 | FGFR1 | gccccagataggtggtgccagtggcttattaattccgatactagtttgctttgctgacca |
| 2717 | NM_000610 | CD44 | gattttgtagccaacattcattcaatactgttatatcagaggagtaggagagaggaaaca |
| 2718 | NM_000628 | IL10RB | ccttttatatcactaaaataagatcatgttttaattgtgagaaacagggccgagcacagt |
| 2719 | NM_000629 | IFNAR1 | tgtctaaaagttaaagcagcactacttacgtcatggaaaattggtgtctatagtccagta |
| 2720 | NM_000640 | IL13RA2 | agactttccatatcaagagacatggtattgactcaacagtttccagtcatggccaaatgt |
| 2721 | NM_000660 | TGFB1 | tgtgacagcagggataacacactgcaagtggacatcaacgggttcactaccggccgccga |
| 2722 | NM_000700 | ANXA1 | gatcctggaaagtaagcgcaaggctactctctaatgctaactcttatgtatgtaagaggt |
| 2723 | NM_000701 | ATP1A1 | ctctaccctggtaggaaagcaccgcagcatgtggggaagcaagacgtcctggaatgaagc |
| 2724 | NM_000717 | CA4 | acctgcgatgagaaggtcgtctggactgtgttccgggagcccattcagcttcacagagaa |
| 2725 | NM_000729 | CCK | agtgcgctctggtcgtctacaccctgaaaccctttgagttcgagtccgcttgctggtgct |
| 2726 | NM_000732 | CD3D | cctcgtaggccacaggggaaaaaggtccatttgtctcaccgggaggctcaatattgcctg |
| 2727 | NM_000773 | CYP2E1 | gcttgtacacaatggacggtatcaccgtgactgtggccgacctgttctttgcggggacag |
| 2728 | NM_000801 | FKBP1A | ccatattgcgcacaaacacccctatcacgaaaattacaccccccaacggcaacttttaca |
| 2729 | NM_000852 | GSTP1 | agcggatgctatggtgccggggcgacaaggtcgcaactataatctaaccgccttgctgct |
| 2730 | NM_000856 | GUCY1A3 | agacgtttagcgggatcatgactatgttgaatatgcagtttgttgtacgagtgaggagat |
| 2731 | NM_000867 | HTR2B | ataagacatttcgggatgcatttggccgatatatcacctgcaattaccgggccacaaagt |
| 2732 | NM_000878 | IL2RB | gtgacatatgtatctatacatccgtatcttttaatgatccgtgtgtaccatctttgtgat |
| 2733 | NM_000885 | ITGA4 | tggctcgccaacgcttcagtgatcaatcccggggcgatttacagatgcaggatcggaaag |
| 2734 | NM_000887 | ITGAX | tcagggcttcatcgtggggctctcagttccgatttcccaggctgaattgggagtgagatg |
| 2735 | NM_000905 | NPY | tcctgcaatgttaaccttggtcagcactcggcacacccctgcgcggtgcacataacagca |
| 2736 | NM_000906 | NPR1 | gtggcgcagaagggttgggggcctgtatgccttgcttctaccatgagcagagacaattaa |
| 2737 | NM_000953 | PTGDR | gcaactgaagcggagactctaaacccagcttgcaggtaagagctttcacctttggtaaaa |
| 2738 | NM_000960 | PTGIR | ctgctgcattgtgggtgatgacgtaggacatgtgcttggtacaaaaagggcctgagacat |
| 2739 | NM_000964 | RARA | ggagcccgtgggtgcacctgttactgttgggctttccactgagatctactggataaagaa |
| 2740 | NM_000967 | RPL3 | tgtagcctactgataactgcaaaggggagcttggaattatgttagtcagtccctgtgaat |
| 2741 | NM_000968 | RPL4 | ttggatctctgggcttttcaagattctgctaagatctgtattaatcatcttgcatggg |
| 2742 | NM_000970 | RPL6 | ggacatatctgtgaaccctccacggtggaaaaaatgccgcccttagtcgggtggggaaaa |
| 2743 | NM_000972 | RPL7A | caaataactggctggcttaacctatgagaagttctatctgacgatcagcttggaacagcc |
| 2744 | NM_001001547 | CD36 | ctgaagagcaaatgaatcctagtacattgaagagtaccgtactctatctggcacttaatt |
| 2745 | NM_001005 | RPS3 | gtgtagtaatgcgtatcagaggtagcggagaatgaagagcgacaagtgggacgagctgta |
| 2746 | NM_001009 | RPS5 | ggtaacaataccgggagcgcaacatacgtacacttctgtaacgcgcactgcacgtgtata |
| 2747 | NM_001015 | RPS11 | aactatttcttagcccatatattcatgtgtcatcgttcaggaacaagtcagtgacaaact |
| 2748 | NM_001019 | RPS15A | attttaatgccgcacatttgcatactatatgcttgttacagtgatccccacagtaactca |
| 2749 | NM_001069 | TUBB2 | cacagacaatactttaattgtaagaggagttccacatcattacatcaacagtgtgaattt |
| 2750 | NM_001079 | ZAP70 | cgataacctcctcatagctgacattgaacttggctgcggcaactttggctcagtgcgcca |
| 2751 | NM_001092 | ABR | ctgatgctccgtgctgttcgggaattgttttatgtacacttgtcaggcagaaaaggtagt |
| 2752 | NM_001130 | AES | gtctgtatatagtcagcttatctcgtgttcaatcgtctgatctctacagagagaagtgga |
| 2753 | NM_001150 | ANPEP | tacaccctgaacccggacttaatccggaagcaggacgccacctctaccatcatcagcatt |
| 2754 | NM_001165 | BIRC3 | cagggacacatttctctgtcttttttgatcagtgtcctatacatcgaaggtgtgcatata |
| 2755 | NM_001175 | ARHGDIB | tgttactttatctcccccaactgatatgttcatagaatgacagtttgtagatagaagatc |
| 2756 | NM_001178 | ARNTL | aagagaatactcgagcgcggagcgattccattgcatttccttccagtagccaggttttga |
| 2757 | NM_001207 | BTF3 | tgtgtcattgtattctttggttctgctcccccactattgaccaatgtatgagatgggaag |
| 2758 | NM_001211 | BUB1B | tcaagatggctgtattgtttggcaccaatatataaactgcttcacccttcaggatcttct |
| 2759 | NM_001219 | CALU | gtgcttctgaggaacaactctaattagtacacttgtgtttgtagatttacactttgtatt |
| 2760 | NM_001226 | CASP6 | cacctgcgcagatagagacaatcttacccgcaggttttcagatctaggatttgaagtgaa |
| 2761 | NM_001228 | CASP8 | ccagacacgtacaaaatccagctatgaatatagagggcttatgattcagattgttatcta |
| 2762 | NM_001229 | CASP9 | ctacacacaaaccagtatcgctcatagatcagcaaaccggggcctactagagtctgaaca |
| 2763 | NM_001237 | CCNA2 | taatacgaaagactggatataccctggaaagtcttaagccttgtctcatggaccttcacc |
| 2764 | NM_001239 | CCNH | aactatacagttgaactaaatatccagcagatacaacaagtagtcagaagttcaaagatg |
| 2765 | NM_001255 | CDC20 | aagcgcaagacgacaggaaacgaagcgagagacgagaagccggtgacgagcagga |
| | | | gaaag |
| 2766 | NM_001256 | CDC27 | ttcgatgatctcccataaacaaatgtaatgggcatattgggactcgtatgtaggaatcaa |
| 2767 | NM_001265 | CDX2 | gccagagtttttaaagccttctggatccatggggggagaagtgatatggtgaagggaagt |
| 2768 | NM_001273 | CHD4 | tagcagtgttatccactacgatgataaggccattgaacggctgctagaccgtaaccagga |
| 2769 | NM_001274 | CHEK1 | cggtgtgcttgggagtggcgattgtgatttacacgacaaaatgccgaggtgctcggtgga |
| 2770 | NM_001280 | CIRBP | gctcaattgaccgtcttttccagacctctttaagtcacactcttaacttagctttctctg |
| 2771 | NM_001295 | CCR1 | acttccactacccaaagacaaaatgtgcccactgtgtgcttttgagtgtattttctttta |
| 2772 | NM_001312 | CRIP2 | gggcagctggttttcttctgagccattagacccaatcgattctgtgttcccaactcggac |
| 2773 | NM_001313 | CRMP1 | ccagtccaacttcagcttatcaggtgcccagatagatgacaacaatcccaggcgcaccgg |
| 2774 | NM_001337 | CX3CR1 | gttccttcaagatcatgtaccccaatttacttgccattactcaattgataaacatttaac |
| 2775 | NM_001344 | DAD1 | taccacaccaaccagacgatcactgcatagtagcacatgacgagtactgcagtcgactcc |
| 2776 | NM_001345 | DGKA | accacagtctgaccgggctgcattgtgtatggtgccacctagagatccacgatgactgcc |
| 2777 | NM_001398 | ECH1 | tgctgcagacccaagacctcgtgaagtcggtccaggccacgactgagaacaaggaactga |
| 2778 | NM_001404 | EEF1G | aacttttagcatcaaacggggcatcttctcacacagtgcacttccgcccaagacagccgg |
| 2779 | NM_001428 | ENO1 | tttccaccaagtgtctagagtcatgtgagcctcgtgtcatctccggggtggccacaggct |
| 2780 | NM_001436 | FBL | acggacctggctagtgacccaaagaccgaagaaaccaagcgaacagccgaagcagat |
| | | | atg |
| 2781 | NM_001441 | FAAH | cccccatgtggcagcccatgggtatgacataggccaaggcccaactaacagtcaagaaac |
| 2782 | NM_001456 | FLNA | gactcaccaagggggatgcagtgcgagatgtggacatcatcgaccaccatgacaacacct |
| 2783 | NM_001462 | FPRL1 | aagagaaacttgtaatggtctctgaaaaggaattgagaagtaattcctctgattctgttt |
| 2784 | NM_001489 | NR6A1 | ggcccttgatggatctaaaactcggaacattactcctcaatgccgtttccccagttgctc |
| 2785 | NM_001513 | GSTZ1 | aaggcatcgactacgagacggtgcccatcaatctcataaaggatgggggccaacagtttt |
| 2786 | NM_001515 | GTF2H2 | cctagaagaatataatggagaaagattttgttatggatgtcagggggaattgaaagacca |
| 2787 | NM_001540 | HSPB1 | tacttttaccctcgcgcgctgattatccaccctgggcgagggataccgatgtgtcccagt |
| 2788 | NM_001560 | IL13RA1 | gtctgcaagtggggtcccagtgtagcaccaatgagagtgagaagcctagcattttggttg |
| 2789 | NM_001607 | ACAA1 | ttgaaagggatactagcctgcagtgggcatctgtcaccgtgtgtgtgcccaagtgggagg |
| 2790 | NM_001630 | ANXA8 | aactacaaattcctgacccaaggacactgtgttataagaggcgtgggctcccctggtggc |
| 2791 | NM_001640 | APEH | ccggaatgtgcctgttcggctcctgctctatcccaaaagcacccacgcattatcagaggt |
| 2792 | NM_001654 | ARAF | tctcaagtctaacaacatcttcctacatgaggggctcacggtgaagatcggtgactttgg |
| 2793 | NM_001664 | RHOA | ggtgggccagacgggttggacatcgttaataatcatagttggcttctaaatactggtagc |
| 2794 | NM_001712 | CEACAM1 | gaggattagcttggagttctctatactcaggtacctctttcagggttttctaaccctgac |
| 2795 | NM_001715 | BLK | cagtcctgaacaccttactggggcttagtactccggatgaccgtgcgaggtcactgttac |
| 2796 | NM_001716 | BLR1 | ctcccttcccataagctatagacccgaggaaactcagagtcggaacggagaaaggtggac |
| 2797 | NM_001728 | BSG | cgccggagtccactcccagtgcttgcaagattccaagttctcacctcttaaagaaaaccc |
| 2798 | NM_001734 | C1S | ttcattaggtccatctgatagtcatgtagggtaggcggaactgataggatttctgtttta |
| 2799 | NM_001743 | CALM2 | tgcaaaacgggtgtattatccaggtactcgtacactatttttttgtactgctggtcctgt |
| 2800 | NM_001747 | CAPG | agcacgcacaaggaacgcaccagatcaaccgacagcagaacgcacgagagccaaga |
| | | | ccat |
| 2801 | NM_001752 | CAT | tagagaatcccactttctatagcagattgtgtaacaattttaatgctatttccccagggg |
| 2802 | NM_001753 | CAV1 | cctcacagttttcatccagccacgggccagcatgtctgggggcaaatacgtagactcgga |
| 2803 | NM_001759 | CCND2 | tatgcgaaaaggtttttaggaagtatggcaaaaatgttgtattggctatgatggtgacat |
| 2804 | NM_001767 | CD2 | cactcaaagccatctgatgctcacatttcatgtagtcagaggaggccatctggtttgaat |
| 2805 | NM_001772 | CD33 | tacattcctgcaatgcatatcattcagacataaagatgggccgaagtacagatacatgct |
| 2806 | NM_001774 | CD37 | ctgctacaacttgtcggcgaccaacgactccacaatcctagataaggtgatcttgcccca |
| 2807 | NM_001776 | ENTPD1 | ctgcccccatattcaacaatctaaccatactgagctgctgattccccagggattgcatat |
| 2808 | NM_001783 | CD79A | ggaaacgacactaggtcgcacagggcatagacgatagtaccattcctggttgaaacacga |
| 2809 | NM_001786 | CDC2 | ttggtcagagtaataactgaaggagttgcttatcttggctttcgagtctgagtttaaaac |
| 2810 | NM_001793 | CDH3 | aggacaccttccgagggagtgtcttagagggagtcctaccaggtacttctgtgatgcaga |
| 2811 | NM_001794 | CDH4 | gggaaggcgcacttggtgctatgagccctccaagtattaaccttacacagagcccccgct |
| 2812 | NM_001795 | CDH5 | tagacaaggacataacaccacgaaacgtgaagttcaaattcaccttgaatactgagaaca |
| 2813 | NM_001798 | CDK2 | ggagcttgttatcgcaaatgctgcactacgaccctaacaagcggatttcggccaaggcag |
| 2814 | NM_001830 | CLCN4 | aagctatgtattaggtccaccatacgatctgtgtaagtaagattatcccacttgcccttt |
| 2815 | NM_001838 | CCR7 | tcaaagccacactctgggctccagagtggggatgacatgcactcagctcttggctccact |
| 2816 | NM_001839 | CNN3 | ttgtgccaatgtatcaatgtagagttgctctgttttcttcaactgtatttattgctgcat |
| 2817 | NM_001897 | CSPG4 | agagtcctggcactggctaggggtgtcaatgcatcagccgtagtgaacgtcactgtgagg |
| 2818 | NM_001901 | CTGF | cagtttatttgttgagagtgtgaccaaaagttacatgtttgcacctttctagttgaaaat |
| 2819 | NM_001905 | CTPS | gaacctcaagtgtgtgttattgagcttggtggaaccgtgggggacatagaaagcatgccc |
| 2820 | NM_001908 | CTSB | aaagatgcttaacaaaggttaccataagccacaaattcataaccacttatccttccagtt |
| 2821 | NM_001916 | CYC1 | cttgaacctcaacacgacagccaacgtgcataagcatgcaacactaccgaggtagccaca |
| 2822 | NM_001923 | DDB1 | tgactgccaagccatgggtagcctgggtgtaaaacctggagatggtggatgatccccacg |
| 2823 | NM_001928 | DF | gacagagcgcagtagtgattagtcgtatttcgcgacacctcacacggtagatgtgatcaa |
| 2824 | NM_001939 | DRP2 | ggactttgccacaaccttaaagaacaaattccgctccaagcattatttcagcaaacaccc |
| 2825 | NM_001941 | DSC3 | ctgtaaccagaagccagttttatctaacggctactgaaacacccactgtgttttgctcac |
| 2826 | NM_001952 | E2F6 | tgttgagtcagtccaaggggttttacttaggacaagttgtaccttgccctctctccagct |
| 2827 | NM_001964 | EGR1 | gtttggcttataaacacattgaatgcgctttattgcccatgggatatgtggtgtatatcc |
| 2828 | NM_001993 | F3 | acatgctttagattatatattccgcacttaaggattaaccaggtcgtccaagcaaaaaca |
| 2829 | NM_001999 | FBN2 | ctgctgttgaacagatcagcctagagagtgtcgacatggacagccccgtcaacatgaagt |
| 2830 | NM_002015 | FOXO1A | gcatttcgctacccgagtttagtaacagtgcagattccacgttcttgttccgatactctg |
| 2831 | NM_002017 | FLI1 | gtcgaagtctacccaatatcccccagtaagagaataaggggcaagaatgactcatgaact |
| 2832 | NM_002023 | FMOD | ctggggagcacttaattcttcccatttcaaaagtaatgttgcctggggcttaacccacc |
| 2833 | NM_002033 | FUT4 | gtaacctcttcaactggacgctctcctaccgggcggactcggacgtctttgtgccttatg |
| 2834 | NM_002046 | GAPD | ccccccacacaaaagcccctttggtgtgaaaaacggcccccacaagtttataaaaggggg |
| 2835 | NM_002049 | GATA1 | caagaagcgcctgattgtcagtaaacgggcaggtactcagtgcaccaactgccagacgac |
| 2836 | NM_002064 | GLRX | cttgaaaactcttctggcgtaaaaacattctcgagttaataatgttaccccttataacag |
| 2837 | NM_002065 | GLUL | agtatgttcaaagtcaaataactcctcattgtaaacaaactgtgtaactgcccaaagcag |
| 2838 | NM_002067 | GNA11 | ttaagttattgacgcccagcgcgcctcgcctcttcacccatcaacgctgtgctttgccca |
| 2839 | NM_002068 | GNA15 | aatctgcagccgctccatggcctcgatcatggcccgcatggacacgaagatgttctggta |
| 2840 | NM_002076 | GNS | tttgacttagaaagtgcccttcaaaaggaccctgttcactgctgcacttttcaatgaatt |
| 2841 | NM_002086 | GRB2 | tcagtgtttaaataaagacctatgtacttaatcctttaactctgcggatagcatttgta |
| 2842 | NM_002090 | CXCL3 | gaaccctcgtaagaaatagtcaaacacattaagtcctttccagctgtccctagaaagctg |
| 2843 | NM_002094 | GSPT1 | ctcccttggcgatctgcaggaacactagtaatgactggaattactccgtgatctttgatg |
| 2844 | NM_002102 | GYPE | catcctgtaacattggcttacctgtatattatatgccacccgtaaccataaaaacaccag |
| 2845 | NM_002107 | H3F3A | tttgagaggtgattgatactgctaacaattttctagtactctagtttgtttcaagaagag |
| 2846 | NM_002108 | HAL | tcggatgctcttggctttaaggatcaatgtcttagccaaaggatacagtggcatttccct |
| 2847 | NM_002110 | HCK | ttgactcttgcaatccacaatctgacattctcaggaagcccccaagttgatatttctatt |
| 2848 | NM_002118 | HLA-DMB | caaggctatatttctgggatgaatataatctgaggaagggagttaaagaccctcctgggg |
| 2849 | NM_002121 | HLA-DPB1 | gttaactattgtataatgtggcctgttatacatgacactcttctgaattgactgtatttc |
| 2850 | NM_002128 | HMGB1 | acccctcttcaatctgaagattagtatggtttggtgttctaacagtatcccctagaagtt |
| 2851 | NM_002129 | HMGB2 | ttgtagctttttgatgggctactcatacagttagattttacagcttctgatgttgaatgt |
| 2852 | NM_002135 | NR4A1 | cggcctttatgttttttgtaagataaaccgtttttaacacatagcgccgtgctgtaaata |
| 2853 | NM_002141 | HOXA4 | tttaagacactgttacagagatactgttgtcaccttctggggcacggtctttggggagag |
| 2854 | NM_002145 | HOXB2 | gcactcggttatcttttaaaattcacacagaaaaattccgtttggtagactccttccaat |
| 2855 | NM_002166 | ID2 | cgactacatcttggacctgcagatcgccctggactcgcatcccactattgtcagcctgca |
| 2856 | NM_002167 | ID3 | acaggaagagagaagaagcgacagccacggaaacaagcaacgccacagagacacga |
| | | | gggc |
| 2857 | NM_002186 | IL9R | cggcctgtgtgaacctgtcgtgcaaagctcacgtcaccaactgctgcagttatctcctga |
| 2858 | NM_002193 | INHBB | tccaagtgccacgtgaactatgcaatttaaagggttgacccacactagacgaaactggac |
| 2859 | NM_002198 | IRF1 | cccctcttattcctctaggcaagcaggacctggcatcatggtggatatggtgcagagaag |
| 2860 | NM_002199 | IRF2 | tctttaggccttgtctgtaaaacgaatggctcaggctaagtgatctctaaatgcctaaat |
| 2861 | NM_002222 | ITPR1 | ataattattattagtgtgggtatggctaatgagttctgattcacccacgaaggttacatt |
| 2862 | NM_002224 | ITPR3 | cttgtacttcattgtgctggtccgcgtgaagaacaagaccgactacacgggccctgagag |
| 2863 | NM_002228 | JUN | aagccgggtagcgcgcgcgagtcgacaagtaagagtgcgggaggcatcttaattaaccct |
| 2864 | NM_002229 | JUNB | aaaatggaacagcccttctaccacgacgactcatacacagctacgggatacggccgggcc |
| 2865 | NM_002230 | JUP | gtaaagtggagccagtgatagtagttaccttgcagggtcgttgtcaggttatgtgagaaa |
| 2866 | NM_002248 | KCNN1 | gaaaaacctgttcccatcaccggcctagcctagaatcctagcctagaagccctctctccc |
| 2867 | NM_002276 | KRT19 | atcacaaccataacccacccacacaaacgatagagactcaataaaacatgtccagctgtc |
| 2868 | NM_002295 | LAMR1 | cagcgcaatggtaggtaggttaacataagatgcctccgtgagaggctggtggtcagccct |
| 2869 | NM_002312 | LIG4 | aacattttgcccgtgaatatgattgctatggtgatagttatttcattgatacagacttga |
| 2870 | NM_002341 | LTB | ggtagatgtataggcagcatgagtggttaagagtcaagggagtagccggggtagtggcttac |
| 2871 | NM_002349 | LY75 | gaagccgtcctgtactgtgccagcaatcacagctttcttgcgactataacatcttttgtg |
| 2872 | NM_002351 | SH2D1A | taagcgaggttccccgtgtgtaggtagatctggtctttagaggcagatagataggtcagt |
| 2873 | NM_002353 | TACSTD2 | gaaggcttaaatgagtttagatgggaaatagcgttgttatcgccttgggtttaaattatt |
| 2874 | NM_002356 | MARCKS | ccaagctgtgataagtggaatggttactgtttatactgtggtatgtttttgattacagca |
| 2875 | NM_002379 | MATN1 | cttgcccttcactcatcgcagttctccccacggctactccaggtcctcttgaaatccgtc |
| 2876 | NM_002388 | MCM3 | ttctctagttcgtcccaaagtcgtccgcagtgtccactactgtcctgctactaagaagac |
| 2877 | NM_002390 | ADAM11 | ggtacggcaaccacatgtcccagatcgtctccaattcgaaaacaaccgtcctgctgtccc |
| 2878 | NM_002392 | MDM2 | gacctactttggtagtggaatagtgaatacttactataatttgacttgaatatgtagctc |
| 2879 | NM_002393 | MDM4 | tctgattagtcaaattattaagtgccatggattactttatgcagcagtcaggtacatagt |
| 2880 | NM_002398 | MEIS1 | ttagagctgcttaaaacaggaagtgatgtataaggtggtggttgttgcatggggacaatg |
| 2881 | NM_002412 | MGMT | agtaggatggatgtttgagcgacacacacgtgtaacactgcatcggatgcggggcgtgga |
| 2882 | NM_002414 | CD99 | caaccaccctagttcctccggtagcttttcagatgctgaccttgcggatggcgtttcagg |
| 2883 | NM_002415 | MIF | cccccgcgaaaacccgcccagcttttattgcccccgttccaaatttctccctatgagtta |
| 2884 | NM_002417 | MKI67 | acttgtactatattggctgccatgatagggttctcacagcgtcatccatgatcgtaaggg |
| 2885 | NM_002419 | MAP3K11 | aagcgcgagatccagggtctcttcgacgagctgcgagccaaggaaaaggaactactga |
| | | | gc |
| 2886 | NM_002421 | MMP1 | accccaaaagcgtgtgacagtaagctaacctttgatgctataactacgattcggggagaa |
| 2887 | NM_002422 | MMP3 | gagaaggggaagcactcgtgtgcaacagacaagtgactgtatctgtgtagactatttgct |
| 2888 | NM_002436 | MPP1 | cgtttttaactgcaactttctataatgccaaaatgacacatctgtgcaatagaatgatgt |
| 2889 | NM_002441 | MSH5 | ccgaaattggggcagtagacgccatcttcacacgaattcatagctgcgaatccatctccc |
| 2890 | NM_002444 | MSN | gaagatcctaccccaattccttgtaggagtataggccggtctaaagtgagctctatgggc |
| 2891 | NM_002447 | MST1R | cacctcgcatgagatgaatgtgcgtccagaacagccgcagttctcacccatgccagggaa |
| 2892 | NM_002460 | IRF4 | gttttacatgccccgtttttgagactgatctcgatgcaggtggatctccttgagatcctg |
| 2893 | NM_002462 | MX1 | tgtgtgtgcgtcctgtcggagccctgtctcctctctctgtaataaactcatttctagcag |
| 2894 | NM_002466 | MYBL2 | cagcctcaccctgtcaggtatcaaagaagacaacagcttgctcaaccagggcttcttgca |
| 2895 | NM_002475 | MLC1SA | cctacacatctcatgacacgcgcccaccctatgcgcgttttcacaaactccgaagaacgc |
| 2896 | NM_002483 | CEACAM6 | ccagtctacttgagttagcataatacagaagtcccctctactttaacttttacaaaaaag |
| 2897 | NM_002512 | NME2 | cttcattccattgacttagaggcaaccaggattgaccattcttttatagagctatttgcc |
| 2898 | NM_002514 | NOV | acggcggtagagggagataactgtgtgttcgatggggtcatctaccgcagtggagagaaa |
| 2899 | NM_002527 | NTF3 | tcactctgtaaaatctgtgtacaccagtattttgcattcagtattgtcaaggccatgact |
| 2900 | NM_002530 | NTRK3 | ggaatatcacttccatacacatagagaactggcgcagtcttcacacgctcaacgccgtgg |
| 2901 | NM_002572 | PAFAH1B2 | atgtgttctcggtcgccgtagacagcgctctggctaccaccgtgaggctacttgaactgt |
| 2902 | NM_002576 | PAK1 | ccattgactaccttctcatgctctgaggtactactgcctctgcagcacaaatttctattt |
| 2903 | NM_002585 | PBX1 | tggcaggatgctactaccccttcatcagtgacctcccctacagaaggccctggcagtgtt |
| 2904 | NM_002592 | PCNA | accgacgaatgacactgacagccgacgaatacccacaacacgctaaacggtagccaca |
| | | | gc |
| 2905 | NM_002600 | PDE4B | tactatcattgtggctttggttcaaaaggaaacactacatttgctcacagatgattcttc |
| 2906 | NM_002608 | PDGFB | tattgtttccctcgtccgtctgtctcgatgcctgattcggacggccaatggtgcttcccc |
| 2907 | NM_002609 | PDGFRB | ggggctttttctttatcaccctcagtcttaatccatccaccagagtctagaaggccagac |
| 2908 | NM_002616 | PER1 | gagtcctccaatcaggacgcactttccggctccagtgacctgctcgaacttctgctgcaa |
| 2909 | NM_002621 | PFC | tttcggaggtaaaagaaagtagctcatgccaacaagtaacattcaccagcatttattgag |
| 2910 | NM_002648 | PIM1 | catcatgagttctgctgaatgccgcgatgggtcaggtaggggggaaacaggttgggatgg |
| 2911 | NM_002658 | PLAU | gtaacagctgaggtctcttgagggagcttagccaatgtgggagcagcggtttggggagca |
| 2912 | NM_002659 | PLAUR | tgactgccagactgtggggaggcactctcctctggacctaaacctgaaatccccctctct |
| 2913 | NM_002687 | PNN | gaattcccggtccgacagaaagaggtctatatcagagagtagtcgatcaggcaaaagatc |
| 2914 | NM_002704 | PPBP | ccaaagtttggaagtgatcgggaaaggaacccattgcaaccaagtcgaagtgatagccac |
| 2915 | NM_002729 | HHEX | agtacctcccaattcaagcagagaaactgacctgactaaagttaatcgcagatgaactag |
| 2916 | NM_002730 | PRKACA | tgaaacagatcgaacacaccctgaatgaaaagcgcatcctgcaagctgtcaactttccgt |
| 2917 | NM_002744 | PRKCZ | acgcccacgtcagggtgaccatctgtggtaaccgagaattccttggaggcagcgtcttca |
| 2918 | NM_002753 | MAPK10 | catgtgatctattactctgacataaacccatctgtaatatattgccagtatataagctgt |
| 2919 | NM_002758 | MAP2K6 | atcttggcagaactttctatatcgcctatagactgatttgcttagatctcttataatttg |
| 2920 | NM_002791 | PSMA6 | acacgcagagagacgtaagcaaaacctaagacgcaaagagcgaagcgactaagaaga |
| | | | agg |
| 2921 | NM_002800 | PSMB9 | gcagttaccatacgagaaatcaaggtcgttgggacggaagtaaccttatctgcttttccc |
| 2922 | NM_002814 | PSMD10 | cttgttttccaggcatcgaataactgttgagattgttctactgttgtcgtatattcttct |
| 2923 | NM_002827 | PTPN1 | taaactcaccttgcttacttcccccttctaaacaacaatcccaacccttacgccatggtg |
| 2924 | NM_002831 | PTPN6 | gtctccccgctggacaatggagacctgattcgggagatctggcattaccagtacctgagc |
| 2925 | NM_002835 | PTPN12 | aatctctaagccacaggaattaagttcagatctaaatgtcggtgatacttcccagaattc |
| 2926 | NM_002844 | PTPRK | gctaaaaaacgcaaagatgccatggggaatacccggcaggagatgactcacatggtgaat |
| 2927 | NM_002856 | PVRL2 | agggttccagactggttggacttgttcgtctggacgacactggagtggaacactgcctcc |
| 2928 | NM_002868 | RAB5B | tcttcctctcccaacataacaatcgtggtaacagaatgcgactgctgatttaccgatgta |
| 2929 | NM_002870 | RAB13 | ttactagatcaggttttagggtcctgcaaaaggctagctcggcactacactagggaattt |
| 2930 | NM_002880 | RAF1 | gatagtggagtcccagcactaccttctttgactatgcgtcgtatgcgagagtctgtttcc |
| 2931 | NM_002887 | RARS | atattgaaggtgaacatgtggcgtatgctgctatgtgaagcagtagctgctgtcatggcc |
| 2932 | NM_002893 | RBBP7 | cccagttggaatactgatagctctaaaaacttagtaaaacctttgttaggattaacagga |
| 2933 | NM_002901 | RCN1 | aaacggagcggagttctggatcatgtcccatccagtccagtgaatccacgacccgcagac |
| 2934 | NM_002908 | REL | gcaaaatgagcaattgagtgactcctttccatatgaattttttcaagtataacttgcaag |
| 2935 | NM_002913 | RFC1 | aaggaagcccaccttactccatactcacttcaagctataaaggcatctagacacagcaca |
| 2936 | NM_002934 | RNASE2 | gacctgtcctagtaacaaaactcgcaaaaattgtcaccacagtggaagccaggtgccttt |
| 2937 | NM_002935 | RNASE3 | tgtgggttgagacactatagagtgtgtcataaccgagaccggataggggagtagttactt |
| 2938 | NM_002936 | RNASEH1 | atgcattagttgtctgtcaaggaaggtgagtggtgaagggtttttacatatatacaagaa |
| 2939 | NM_002953 | RPS6KA1 | ctgtttagcagaactcattctatccccaatcagctccttttccgttctgttctgctggga |
| 2940 | NM_002960 | S100A3 | gccacctggaccccgactgagtttcgggaatgtgactacaacaaattcatgagtgttctg |
| 2941 | NM_002961 | S100A4 | tcgcatacaatcatgtctcacagcgctgatcttagcacattatgtcatgtttccatctca |
| 2942 | NM_002971 | SATB1 | aaaatgtgctttacacagttgcctataaaaagtgctctatgttatccaagcaattcatac |
| 2943 | NM_002972 | SBF1 | aagtctgagcccttccgcatttctccggtcaaccgcatgtatgccatctgccgcagctac |
| 2944 | NM_002975 | CLEC11A | tgctgatctcgtggacatgcttccgctccagctgttagcgacttgagctcgtcttcacag |
| 2945 | NM_002983 | CCL3 | accagttctctgcatcacgtgagtctgagtttcgttgtgggtatcaccactctctggcca |
| 2946 | NM_002984 | CCL4 | cacaaatcaacggttgttatatgtagtttaaaacctaaccagtgtgcggggaatttttct |
| 2947 | NM_002985 | CCL5 | acttcagattctacattaccactcaaacgcgaaacacaatcaaaatacccgagagaccgc |
| 2948 | NM_003002 | SDHD | acaggtgtctaacgggcaatcgcctagaaacgatagagacagaacgcatgcgcgcagg |
| | | | cg |
| 2949 | NM_003005 | SELP | gtgaggctatttcgtgtgagccgctggagagtcctgtccacggaagcatggattgctctc |
| 2950 | NM_003006 | SELPLG | caaggaagatggagctcccccatcccacacgcactgcactgccattgtcttttggttgcc |
| 2951 | NM_003009 | SEPW1 | tcctcctgtcccgtggtttcatcatatctctttgcataccccatgtcttccccagttgtc |
| 2952 | NM_003025 | SH3GL1 | tggaccggtggctagcaatatcgtgtgttgcgcactcgtaaagtgtgttatttcaaccct |
| 2953 | NM_003038 | SLC1A4 | gtcggtagaccaggggttacgtgactggggaaaatctcacatctccttgtctgaaaacat |
| 2954 | NM_003039 | SLC2A5 | gaagacttccccttgacgttgctgtggtctgtaaccgtgtccatgtttccatttggaggg |
| 2955 | NM_003058 | SLC22A2 | tgcttgggaagaatggggatcacaatggcctatgagatagtctgcctggtcaatgctgag |
| 2956 | NM_003072 | SMARCA4 | tcatcatcgtgcctctctcaacgctgtccaactgggcgtacgagtttgacaagtgggccc |
| 2957 | NM_003073 | SMARCB1 | ggaggaccagtcagaccagcgcgtcatcatcaagctgaacatccatgtgggaaacatttc |
| 2958 | NM_003100 | SNX2 | ctcctagaattgaatcaaagagtatgtctgctcccgtgatctttgatagatccagggaag |
| 2959 | NM_003113 | SP100 | tttgaatgagcagacgtacacccgagtagaagggtttgtgcaggacatgcgtctcatctt |
| 2960 | NM_003118 | SPARC | caagtactaggcgtggatatctggataatgaaggagtgtgaattaagaaggagtaccagg |
| 2961 | NM_003120 | SPI1 | ttgggaagttcccaactttcccgttagggtaaaatccgaaattttcccctttttaaaccc |
| 2962 | NM_003121 | SPIB | aggaggaaggaatgccaatgacctagagacacgagaagtccatgtggaggcacacagc |
| | | | ag |
| 2963 | NM_003123 | SPN | cgcttttcataatgtgcaaagtcatcaaagattgaggtggtatgcttgaaagtagcaatt |
| 2964 | NM_003127 | SPTAN1 | tgcaggcctttgccgaccagctcatcgctgccggccattatgccaagggagacatttcta |
| 2965 | NM_003128 | SPTBN1 | caggactatgagcatgtcacgatgttacaagaacgattccgggagtttgcccgagacacc |
| 2966 | NM_003133 | SRP9 | cacatttaaactacctgttaatataagggatttgtagtatcagcttgttgagcaatgact |
| 2967 | NM_003159 | CDKL5 | cccaacccagcaatccgggttctctttcttcgtgagacacgttatgagggaagccctgat |
| 2968 | NM_003189 | TAL1 | gcccagcactttccgtcaacgttgtactgtatgtgatgaattgcgttggtctctgcattt |
| 2969 | NM_003200 | TCF3 | tggcctcgatctactccccggatcactcaagcaataacttctcgtccagcccttctaccc |
| 2970 | NM_003222 | TFAP2C | tctatttaattgaaactctctgttcagaaagcaataactttgtctcgttcctgttgggct |
| 2971 | NM_003225 | TFF1 | agaggaccgccagcgcgcatagagagatcggtgcgcggacagatttgtctcgaacatagt |
| 2972 | NM_003234 | TFRC | gcttgaagatcgttagtatctaacatgtatcccaactcctataattccctatcttttagt |
| 2973 | NM_003262 | TLOC1 | agaggtctgtgaattgtaggttaagaacccctgccctagctaatcagatccaccaatgtt |
| 2974 | NM_003288 | TPD52L2 | ccacaggtcacgctcaggacccgcatctcattccgatcctccttgtgtgggtggtactta |
| 2975 | NM_003302 | TRIP6 | agttcccatcctttgattgatcactctccctgacatccacctgtatgactttgtcaccaa |
| 2976 | NM_003311 | PHLDA2 | taatctttcaccgccccagcgcagacctgggaagcggaaaatcccgccgtattttcccag |
| 2977 | NM_003315 | DNAJC7 | acttacataaaagcctacttgagaagagctcagtgttacatggacacagaacagtatgaa |
| 2978 | NM_003318 | TTK | aatcactggcagattccggagttagcccgaaaagttaatacagagcagaaacataccact |
| 2979 | NM_003352 | SUMO1 | tatgatccaggccgatctacagtcattcaccgggggtaggagagtcacacaagtacaacc |
| 2980 | NM_003361 | UMOD | ttctcaaaatgggacttgtgacggtgtacctgaggcccccatctccttaaagagtgtggc |
| 2981 | NM_003383 | VLDLR | cagtctatggtgccaataaattcactggatcagagcatgccactctagtcaacaacctga |
| 2982 | NM_003390 | WEE1 | gccctactcccacgtatccaacctagtctaccctagaatccactaacgctttattatgtt |
| 2983 | NM_003395 | WNT9A | tgtctgctagctagttggtttctatacaaatacatattcgaatgtcttgctggatgaaga |
| 2984 | NM_003403 | YY1 | agttgctgagtgggttgatctctggtctttccttgacagtgcacgttcgaaggctgtggg |
| 2985 | NM_003415 | ZNF268 | gcatataccttggagggaccatgctatgagggaaagtgtaaatctagaaatgagaaaccc |
| 2986 | NM_003425 | ZNF45 | tttaacttttatggtttggtcgtaggatcagcagggctcgcacttcggtcagcaggaaaa |
| 2987 | NM_003427 | ZNF76 | ttggcaccagggacttcctgacaccacagtcaattaattcctcaggggcctgtggctgga |
| 2988 | NM_003453 | ZNF198 | atgctcttgatacagagttgcttacaatgacggatatgatgagtgaagacgaggggaaaa |
| 2989 | NM_003467 | CXCR4 | agggaactgaacattccagagcgtgtagtgaatcacgtaaagctagaaatgatccccagc |
| 2990 | NM_003480 | MFAP5 | gtcaacaaggagatctgctctcgtcttgtctgtaaggaacacgaagctatgaaagatgag |
| 2991 | NM_003549 | HYAL3 | ttttcctatggagggaaccttgggtaggtttgagcagggggtatagtgtctgctttgcat |
| 2992 | NM_003582 | DYRK3 | ggagcatcttaagaaacaggataaaactggtagtatgaacgttatccacatgctggaaag |
| 2993 | NM_003627 | SLC43A1 | aagggacctggatgacaggcaatcaaggcctgagcaaccaaaaggagtgccccatatg |
| | | | gc |
| 2994 | NM_003636 | KCNAB2 | aaacgagactcagaccgcgacacagccaccgtatttatggaatgacaaaataaataaagc |
| 2995 | NM_003645 | SLC27A2 | gaagattgtgaggaaattttgtaggaaatttgcatacccgtaaagggagacttttttaaa |
| 2996 | NM_003692 | TMEFF1 | cacatggtaattctaagacttgttctttacccatggaatgtaatatttttgcaaagatgg |
| 2997 | NM_003701 | TNFSF11 | agtatcttcaactaatggtgtacgtcactaaaaccagcatcaaaatcccaagttctcata |
| 2998 | NM_003707 | RUVBL1 | aactgttcctgtggttgctttgaaagaacccttccttacctggtgtgttttctataaatc |
| 2999 | NM_003739 | AKR1C3 | tcttctatttcacacaagacttctcccgccgtattggttgcggaccttgcgcggccggag |
| 3000 | NM_003746 | DNCL1 | ggagtgacgcgataaaacgccgaacggaacacgaactgcgacactgaaagaacccac |
| | | | ccg |
| 3001 | NM_003753 | EIF3S7 | tgaccttattgtccgttgtgagcacgatggcgtcatgactggagccaacggggaagtgtc |
| 3002 | NM_003801 | GPAA1 | ggccctaaccctgcgtggcatcaatagcttccgccagtacaagtatgacctggtggcagt |
| 3003 | NM_003805 | CRADD | tcttcctaagtggtagatctaaataccataaatggtggctagctttataggaaaacccat |
| 3004 | NM_003821 | RIPK2 | tttggtttatcaaagtggcgcatgatgtccctctcacagtcacgaagtagcaaatctgca |
| 3005 | NM_003824 | FADD | cgctcttgtcgatttcctgtagtgaatcaggcaccggagtgcaggttcgggggtggaatc |
| 3006 | NM_003842 | TNFRSF10B | tatttgggctacattgtaagatccatctacacagtcgttgtccgacttcacttgatacta |
| 3007 | NM_003852 | TIF1 | caacagaagggtaggttagatgctattaagaaggcacttaatagtacatcatgtaagatg |
| 3008 | NM_003874 | CD84 | aatgaatccatagactcatctagcaccaactaccattagcactatgttaggagctgcaag |
| 3009 | NM_003877 | SOCS2 | gctagaacatttactaatgccaggtgttgcatttgacactttacaagtataacctcactg |
| 3010 | NM_003879 | CFLAR | gacgtcgaggcattacaatcgcgaaaccaagccatagcatgaaacagcgagcttgcagcc |
| 3011 | NM_003884 | PCAF | atgcgtccagggtcataaccccctaaaatccatcatgcaaccttattaatctgtcttggg |
| 3012 | NM_003900 | SQSTM1 | gtccacatgtgaactttttctaggtggcaggacaaatcgcgcccatttagaggatgtggc |
| 3013 | NM_003902 | FUBP1 | agttatttacaattcgtggcactccacaacagatagactatgctcggcaactcatagaag |
| 3014 | NM_003914 | CCNA1 | cacttgccagttgttccggacacatagaaagataacgacgggaagagcggggcccgcttt |
| 3015 | NM_003954 | MAP3K14 | ggtctggaatacctccactcacgaaggattctgcatggggacgtcaaagctgacaacgtg |
| 3016 | NM_003955 | SOCS3 | aacccatgcctcccagctgagcactgggaatgtcagcccagtaagtattggccagtcagg |
| 3017 | NM_003974 | DOK2 | agctgtacgactggccctacaggtttctgcggcgctttgggcgggacaaggtaacctttt |
| 3018 | NM_003998 | NFKB1 | gttgtccctctgctacgttcctattgtcattaaaggtatcacggtcgccacctggcattc |
| 3019 | NM_004039 | ANXA2 | tttatttctcttatcgctccttctaagtacacagacggaagggacaaggagcggaacagg |
| 3020 | NM_004047 | ATP6V0B | tatattaccggctcctccatcattggtggaggagtgaaggcccccaggatcaagaccaag |
| 3021 | NM_004064 | CDKN1B | aagactgatccgtcggacagccagacggggttagcggagcaatgcgcaggaataagga |
| | | | ag |
| 3022 | NM_004067 | CHN2 | gttattaccctgtgtaccttgtccctcattttgctgtgacaccctgaaaaagctgaccac |
| 3023 | NM_004077 | CS | gaaccacactgttgagttggacacactgtaaacccctgggtaactgtcaagtcatgatgg |
| 3024 | NM_004083 | DDIT3 | tgatgtgaccctcaatcccacatacgcagggggaaggcttggagtagacaaaaggaaagg |
| 3025 | NM_004088 | DNTT | caaagcccactttgttcgcagtgtagctgaaatactgtctatctctaataaaaacaggag |
| 3026 | NM_004093 | EFNB2 | gaagagcccgtcgcgctggacagcttacctagtcttgtagcattcggccttggtgaacac |
| 3027 | NM_004099 | STOM | agatgagcgctagccttccaagcatgaagtcggggaccaaattagcctttaactcataaa |
| 3028 | NM_004104 | FASN | gaaatttactgtaactgtcagtgtacacgtctggaccccgtttcatttttacaccaattt |
| 3029 | NM_004111 | FEN1 | tctagttattcagaggagtaagatggtgatgttcacctggcaatcagctgagttgagact |
| 3030 | NM_004119 | FLT3 | tttccttgtgagcaaaagggtcttgataacggatacagcatatccaagttttgcaatcat |
| 3031 | NM_004177 | STX3A | atgatactgatgcggttgagattgctatcgacaacacggcttttatggacgagttctttt |
| 3032 | NM_004208 | PDCD8 | ttgggaaggaggcgggtagagcaccatgatcacgctgttgtgagtggaagattggctgga |
| 3033 | NM_004221 | NK4 | ccgaggagcctaggggagagctttagtgacaaggtcatgagatggttccaggccatgctg |
| 3034 | NM_004235 | KLF4 | caaactgctgcatactttgacaaggaaaatctatatttgtcttccgatcaacatttatga |
| 3035 | NM_004310 | RHOH | gtttttggaattgcttccctttccccacaagaacaaagcactggccgggtaaggtggctc |
| 3036 | NM_004313 | ARRB2 | gaatggggtggtagacttggaagagggatgggctagttggcaggatttcacgtttctgct |
| 3037 | NM_004320 | ATP2A1 | gctcgacgaaatcctcaagttcgttgctcggaactacctagagggataactgttccccct |
| 3038 | NM_004324 | BAX | aactgatcagaaccatcatgggctggacattggacttcctccgggagcggctgttgggct |
| 3039 | NM_004335 | BST2 | tgggagctggggtagtacttcttgtccgcgattctcacgcttaagacctggttttctctt |
| 3040 | NM_004336 | BUB1 | tgcccacttattccagaatggcagtgtattagtaggagagctctacagctatggaacatt |
| 3041 | NM_004343 | CALR | tggacggagacgggtggacttcccgctggatcgaatccaaacacaagtcagattttggca |
| 3042 | NM_004355 | CD74 | ccatagactggaaggtctttgagagctggatgcaccattggctcctgtttgaaatgagca |
| 3043 | NM_004374 | COX6C | tcacagaatttcttcaggttgaattacctagaagtttgtcactgacttgtgttcctgaac |
| 3044 | NM_004380 | CREBBP | ccaagaatacggctctgattgcccccctccaaacacgaggcgtgtgtacatttcttatct |
| 3045 | NM_004385 | CSPG2 | caatctatttaccaggacctgatcgctgcaaaatgaacccgtgccttaacggaggcacct |
| 3046 | NM_004413 | DPEP1 | tgcagacttctttcgggacgaggcagagaggatcatgagggactcccctgtcattgatgg |
| 3047 | NM_004425 | ECM1 | gtgtgccaaacttgtggtaaggttgggttcttgatgccggggggtgtcctttaaccccag |
| 3048 | NM_004430 | EGR3 | gccacagcttgcagcatggtcttgactgaatgtactgttcctgttagcgttacttctcct |
| 3049 | NM_004448 | ERBB2 | agtgttgagggaaaacacatcccccaaagccaacaaagaaatcttagacgaagcatacgt |
| 3050 | NM_004449 | ERG | ggactcaggacatttggggactgtgtacaatgagttatggagactcgagggttcatgcag |
| 3051 | NM_004454 | ETV5 | ttcgcagggataaggggtgcactttatagctatggaaacatgagattctcctctattgga |
| 3052 | NM_004475 | FLOT2 | tcagaggatttccctagagattatgacgttgcagccccgctgcgaggacgtagagacggc |
| 3053 | NM_004494 | HDGF | tcttcctactggtctctctatgcctctctacagtctcgtctcttttaccctggcccctct |
| 3054 | NM_004501 | HNRPU | agtggagggggtaagctaaatcatagtttctgacaataactgggaaggttttttcttaaa |
| 3055 | NM_004508 | IDI1 | tcatccattaagcaatccagccgagcttgaggaaagtgacgcccttggagtgaggcgagc |
| 3056 | NM_004513 | IL16 | ttaagaggcaggctcggatggactatagctttgataccacagccgaagacccttgggtta |
| 3057 | NM_004526 | MCM2 | ccatctatcagaactaccagcgtatccgaatccaggagagtccaggcaaagtggcggctg |
| 3058 | NM_004530 | MMP2 | agtgatggttcccctgttcactctacttagcatgtccctaccgagtctcttctccactgg |
| 3059 | NM_004557 | NOTCH4 | ggcatatgggatgtaagatgttctttcctatatatggtttccaaagggtgcccctatgat |
| 3060 | NM_004583 | RAB5C | gcaccttcctgggcatactctgcgttaaggtggacgttttgaccgagtcgatgcgccgtt |
| 3061 | NM_004615 | TM4SF2 | ctgcttattttaatcacagaagccttaaggggactgatagttgtatgaagggtaggagct |
| 3062 | NM_004624 | VIPR1 | tctgccagaagatcccctcaggactgcaacaggcttgtgcaacaataaatgttggcttgg |
| 3063 | NM_004633 | IL1R2 | gattttaaatgtgttgtccataataccctgagttttcagacactacgcaccacagtcaag |
| 3064 | NM_004642 | CDK2AP1 | gactgtaagtagatctcagttctgcgtttattgtaagttgataaaaacatctggaagaaa |
| 3065 | NM_004688 | NMI | gcacctacatcattgcttctacgcttgacgtggctctgagctcccaatctcctgggacag |
| 3066 | NM_004689 | MTA1 | agatgttggaatatatggtccaatgaagcacatccctcgcgcccgacccgccctggcagt |
| 3067 | NM_004706 | ARHGEF1 | acggcccttcggaaagtgctgtccctgaagcagcttctgtttccggcggaggaagacaat |
| 3068 | NM_004725 | BUB3 | gactgtgccaattccatcggtaccccacgagcatcgcatcacttgccttcagtaatgatg |
| 3069 | NM_004815 | PARG1 | gttccaactctatttttgatccggattacatcaaggagttggtgaatgatatcaggaagt |
| 3070 | NM_004827 | ABCG2 | gtaggttagtagcccttcagtcttaatactttatgatgctatggtttgccattatttaat |
| 3071 | NM_004867 | ITM2A | tgttgagaccaagatctgtcaagagtaagaggcaacagatagagtgtccttggtaataag |
| 3072 | NM_004924 | ACTN4 | tcataatgaagacatagccgattctctgcccgggccccttgctgatgctcctccgggtct |
| 3073 | NM_004936 | CDKN2B | gacaggtttagctgtttcatcagcagcctaatatatactgttaaatttgttaaggatttc |
| 3074 | NM_004938 | DAPK1 | ctatgatgttaaccaacccaacaagcacgggacacctccattactcattgctgctggctg |
| 3075 | NM_004941 | DHX8 | aagtccacagtccgagtgcagaaggccatctgcagtgggttcttccgtaatgctgccaag |
| 3076 | NM_004972 | JAK2 | agaaagcaggtaatcagactggactgtatgtacttcgatgcagtcctaaggactttaata |
| 3077 | NM_004994 | MMP9 | tatttctgccaggaccgcttctactggcgcgtgagttcccggagtgagttgaaccaggtg |
| 3078 | NM_004997 | MYBPH | gcagaaggcagacaaaaagacagggcaatggttcacagtgctggagcgctaccaccca |
| | | | ac |
| 3079 | NM_005012 | ROR1 | taatcatatctgacacttacatagtactccagcttgaatagtactcatgtgcctccgggt |
| 3080 | NM_005080 | XBP1 | ttttaggtcctttagtttgcttctgtaagcaacgggaacacctgctgagggggctctttc |
| 3081 | NM_005084 | PLA2G7 | gacatagattcaaatgcagctattgatcttagcaacaaagcttcattagcattcttacaa |
| 3082 | NM_005085 | NUP214 | ggaacgctcgagtctgcttgctgtgtccaacaaatatggtctggtcttcgctggtggagc |
| 3083 | NM_005098 | MSC | acgtgagatccgcgtcgggacagggttttaagtgacaaagaagggcgagtggcttctctg |
| 3084 | NM_005104 | BRD2 | cgccattacaatccacctccatccgcttggaaatggccttcgtcccggcctatgactggt |
| 3085 | NM_005123 | NR1H4 | ttgaagctatgttccttcgttcagctgagattttcaataagaaacttccgtctgggcatt |
| 3086 | NM_005157 | ABL1 | ctcttgaactgggcgaatgtcttatttaattaccgtgagtgacatagcctcatgttctgt |
| 3087 | NM_005161 | AGTRL1 | ctgccagagagaccgtgaggatgaaattaatagtggggcctttgtgagctagaggctggg |
| 3088 | NM_005178 | BCL3 | aggtgggccgtaacgggcacggatcacgatgtaaattattaagcattttggttggatttc |
| 3089 | NM_005187 | CBFA2T3 | atagtctttgcagaggtccaaatgatattcatgatggtaataaacgagatgtttgccaaa |
| 3090 | NM_005192 | CDKN3 | ttttatataccacgccacccatggggggtcttaacacgtgggggggcacccgataagcag |
| 3091 | NM_005197 | CHES1 | atatacatcaacacttttgctatataacctaagtgataaccctcttttagttacctgcca |
| 3092 | NM_005215 | DCC | gtgataggcttactcatcaaatcatggatctcaaccttgatactatgtattactttcgaa |
| 3093 | NM_005225 | E2F1 | taaaggttttttctgattgaagctttaatggagcgttatttatttatcgaggcctctttg |
| 3094 | NM_005230 | ELK3 | atgttgccaaacgctgccagtatttcatccgcctcacccttctcatctcggtccccgtcc |
| 3095 | NM_005239 | ETS2 | gcctaacagttatggaaactacagtccttataaaccattggcatggtaataaacagatct |
| 3096 | NM_005245 | FAT | tcaattatagatggcaaccaaggaagctcgttcacaattgaccccgtcaggggagaagtc |
| 3097 | NM_005246 | FER | agaaagtttgcaagtaatgttgaaaacgttagcggaagaacttatgcaaacacagcagat |
| 3098 | NM_005248 | FGR | aagggccgaatcccctacccaggcatgaataaacgggaagtgttggaacaggtggagc |
| | | | ag |
| 3099 | NM_005252 | FOS | ctgatcatgcattgttgaggtggtctgaatgttctgacattaacagttttccatgaaaac |
| 3100 | NM_005263 | GFI1 | ccttcccatttccagccctaatctacagacaggaatgcccttcaggtttcttccctcccc |
| 3101 | NM_005318 | H1F0 | cctctggatttttgttcctcctgtacaagaggtgtctttgcttggtttggtggggctgcg |
| 3102 | NM_005334 | HCFC1 | tattgtagagtaacccctgtgactcaatattaccatagtgcgatgtcgttttgtgctatt |
| 3103 | NM_005335 | HCLS1 | ctctgggcttcccagtttgtttacccgggaaagtacgtctagattgtgtggtttgcctca |
| 3104 | NM_005339 | HIP2 | gggtctattctgagccgttaacttcctgtaaggggaaaatgggtgggttaccagaaatac |
| 3105 | NM_005340 | HINT1 | ccatgttcttggaggtcggcaaatgcattggcctcctggttaagcacgttttggggataa |
| 3106 | NM_005356 | LCK | acatgtgacacatatgcaccttgtgtctgtacacgtgtcctgtagttgcgtggactctgc |
| 3107 | NM_005375 | MYB | acccccctcattggtcacaaattgactgttacaacaccatttcatagagaccagactgtg |
| 3108 | NM_005385 | NKTR | aaatgggtcggatagtaagcagtacaatatcatgtgtccctgtaaggaaggttcccaagt |
| 3109 | NM_005424 | TIE1 | atggagcagcctcgaaactgtgacgatgaagtgtacgagctgatgcgtcagtgctggcgg |
| 3110 | NM_005427 | TP73 | gtccaaactgcatcgagtatttcacctcccaagggttacagagcatttaccacctgcaga |
| 3111 | NM_005439 | MLF2 | attcaccgtcagcatatgagccgaatgctgtccggtggctttggatatagccccttcctc |
| 3112 | NM_005494 | DNAJB6 | gcattgtagcacgcgctgtatggttgtgcgttgtagcgtgcgctgtatagttgtgatgcc |
| 3113 | NM_005504 | BCAT1 | gtaatctactgttgggatggtaagaattgatgtaggctgtggtgtaagaatgaattaaaa |
| 3114 | NM_005521 | TLX1 | cacacatggaaacccataggtccacacacaggtggtgttactgtccctcctggtgtcacc |
| 3115 | NM_005529 | HSPG2 | ggtctcaccagctgattctggagaatatgtgtgccgtgtggagaatggatcgggccccaa |
| 3116 | NM_005533 | IFI35 | ctgactttctcgcggcggtagacagcgcctcgcagttgctgtcgacatatttgttcctac |
| 3117 | NM_005556 | KRT7 | actctcaaacaccagcccctctatcggcagcctgtctgaagttctttgaagcccctgtca |
| 3118 | NM_005563 | STMN1 | cacacacacccgcccgaagagcctcagtgcttacactaaggagtcgtcttctatgcaata |
| 3119 | NM_005566 | LDHA | acacaagattaataccatccagcatcaggatatagctgtggattttacaaaccattctta |
| 3120 | NM_005572 | LMNA | gtgcgtgaggagtttaaggagctgaaagcgcgcaataccaagaaggagggtgacctgata |
| 3121 | NM_005583 | LYL1 | catccttttgttaattcttcaggggcccgttcccgactggcgccgttcgtttccgcccat |
| 3122 | NM_005589 | ALDH6A1 | cctagtgtaacaatgaaaccagatttctcacttgctcttcatacttctattttgaggtaa |
| 3123 | NM_005608 | PTPRCAP | tttttaatcccgccaacgcacaatctccggaggaatgcccacgagctctcgcgttggtgg |
| 3124 | NM_005621 | S100A12 | atgctaatcaagatgaacaggtcgactttcaagaattcatatccctggtagccattgcgc |
| 3125 | NM_005651 | TDO2 | gatgctctgatttaattctagaaacaatttgattacctcttgtttgtgacaagactaagc |
| 3126 | NM_005654 | NR2F1 | agacaggagcagcccacccagcagaaatacaatccgagctacaaagcatgggaaaaa |
| | | | gag |
| 3127 | NM_005671 | D8S2298E | gaagaagcttcaaagctcttggaggctttaaagttctttctgttgggtgtgcattacagt |
| 3128 | NM_005687 | FARSLB | aaatacttaattgagctactagtttctctattgtcccagggagatattagacctctcttt |
| 3129 | NM_005730 | CTDSP2 | acttgccccagagaagctactcggccaaacctagccagggtctgttcttgtggaccagag |
| 3130 | NM_005731 | ARPC2 | gtgtacgggagtttcttggtaaatccagaatcaggatacaatgtctctttgctatatgac |
| 3131 | NM_005738 | ARL4A | taggctatttagtcccatagtagttcagatctgcttagatgtgacaggcattgaaggctg |
| 3132 | NM_005761 | PLXNC1 | tgcagccgaaactcatgctgagacgcacggagtccgtcgtcgaaaaactcctcacaaact |
| 3133 | NM_005767 | P2RY5 | gaggaagtgcacccgccgtttttgttcagtctacccactctcagggtaacaatgcctcag |
| 3134 | NM_005781 | TNK2 | gatgcgagcactacctcagaatgacgaccattacgtcatgcaggaacatcgcaaggtgcc |
| 3135 | NM_005794 | DHRS2 | ccagagtgtcaggacatgtgtgacttagcccagattcagactttagtcacaagcaggatc |
| 3136 | NM_005808 | CTDSPL | atatttcatgggaatcgaacctagggatagtgctccacttctgacgatggagtgaagaca |
| 3137 | NM_005809 | PRDX2 | aacttaccgatcatcgcacgccggagttcgatcacgagaccgacggggaactgtcgatct |
| 3138 | NM_005826 | HNRPR | caggaagccgtgaaactgtgtgacagctatgaaattcgccctggtaaacaccttggagtg |
| 3139 | NM_005835 | SLC17A2 | ataacgcagcgtgtgagtctgagcattgcgatcatcgccatggtgaacaccactcagcag |
| 3140 | NM_005845 | ABCC4 | tggttacaaacacttccaatggacagccctcgaccttaactattttcgagacagcactgt |
| 3141 | NM_005870 | SAP18 | gtatgatacctgtacttaagcatcactcaagggtaagtgttctaggaaggttgatttagc |
| 3142 | NM_005895 | GOLGA3 | tccccacaccgtgtgtcacaacaggctagggcacttcacgatgtcactacttgtttttct |
| 3143 | NM_005900 | SMAD1 | actcaaatgggttcacctcataatcctatttcatctgtatcttaaatggccccaggcatc |
| 3144 | NM_005902 | SMAD3 | gctgtctaccagttgacccgaatgtgcaccatccgcatgagcttcgtcaaaggctgggga |
| 3145 | NM_005907 | MAN1A1 | ctatcgagactcatttgatccgcaagtctagcagcggactaacttatatcgcagagtgga |
| 3146 | NM_005911 | MAT2A | tggcagaactacgccgtaatggcactttgccttggttacgccctgattctaaaactcaag |
| 3147 | NM_005923 | MAP3K5 | gaattcggcagcgagtagataatatcgaagtcttgacagcagatattgtcataaatctgt |
| 3148 | NM_005933 | MLL | ctgcttcagcccgattgttttcgccactccattctggaacaaggtttgatatgcacaaaa |
| 3149 | NM_005936 | MLLT4 | agcttaccaacttgagcggcatcgaatagaggcagctatggaccgaaagtctgatagtga |
| 3150 | NM_005944 | CD200 | gggaccacgtctgttaccagcatcctccatatcaaagaccctaagaatcaggtggggaag |
| 3151 | NM_005954 | MT3 | gtttttcaccggggcgtggctaccctgtcgtgacgcgtttccgcgtattgtcccctataa |
| 3152 | NM_005956 | MTHFD1 | agcaaaaaggtgtccctacaggcttcattctgcccattcgcgacatccgcgccagcgttg |
| 3153 | NM_005957 | MTHFR | gtttctccatcagcttatgggatccttgtctttactgacaagaatggaatagaaatgtaa |
| 3154 | NM_005965 | MYLK | aaccaggattcttatttgtgctgttatagaatatcagctctgaacgtgtggtaaagattt |
| 3155 | NM_006005 | WFS1 | tgacatgggtgtgccaggctagactaggaggttccggtgtctggaaaagcactttacaga |
| 3156 | NM_006017 | PROM1 | tcttcacgcagagattttcatctattatactttatcaaagattggccatgttccacttgg |
| 3157 | NM_006038 | SPATA2 | cgtgatgccacgtaacttaccctatggacaaaagcaggaatgactaacacatcctaggag |
| 3158 | NM_006060 | ZNFN1A1 | gattctaatcccaacaagcaagggtctccttcaagattaatgctatcaatcattaaggtc |
| 3159 | NM_006079 | CITED2 | gatgtgggccaaactgttctggatcaggaaagtcatactgttcactttcaagttggctgt |
| 3160 | NM_006082 | K-ALPHA-1 | gccatggtaaatacatggcttgctgcctgttgtaccgtggtgacgtggttcccaaagatg |
| 3161 | NM_006084 | ISGF3G | cctctttgtgataattctcagtagttgtccgtgataatcgtgtcctgaaaatcctcgcac |
| 3162 | NM_006098 | GNB2L1 | gtggaagacagcgtcatggaaggagcacttagccagcgtctctaacgtaaaatggcaaac |
| 3163 | NM_006101 | KNTC2 | tttggaaagttgagtataaacaaaccgacatctgaaagaaaagtctcgctatttggcaaa |
| 3164 | NM_006113 | VAV3 | aacaagggacactcaaactaccagagaaacggaccaatggactgcgaagaactcctaa |
| | | | ac |
| 3165 | NM_006120 | HLA-DMA | cattctttggtgtcccttccccttatgattttactttccacagtgaatggcatttatttt |
| 3166 | NM_006152 | LRMP | tttcctctttttgcctttatctccccaactaaaatacaatggggaagaagtctgcctatg |
| 3167 | NM_006184 | NUCB1 | cccctaccttttgtggaaccagtgatgcctcaaagacagtgtcccctccacagctgggtg |
| 3168 | NM_006185 | NUMA1 | tgggcctggccagtcttcctcttagcctctggatctagaagggaccataagaggagtagg |
| 3169 | NM_006187 | OAS3 | cttaaacagcatggcgctggtacgtaaatagaccaatgcagttaggtggctctttccaag |
| 3170 | NM_006190 | ORC2L | gatttttaccagcagtgtcgggaggcattcctcgtcaatagtgatctgacactccgggcc |
| 3171 | NM_006191 | PA2G4 | caaaattcatcgtcttcaagcccctctttctagccttttctactactctctgcttggtca |
| 3172 | NM_006196 | PCBP1 | ttggatgcatctactcaaaccacccatgaactcaccattccaaataacttaattggctgc |
| 3173 | NM_006209 | ENPP2 | acccagaacaggcttgtgttgtaatagtgtgggccgctttgtctcaaatccgcagttcta |
| 3174 | NM_006216 | SERPINE2 | tggaacagcagtataaggtagtaggtcccggatgagtggtctacattccagtgcagagga |
| 3175 | NM_006230 | POLD2 | aaaagaaaatggcagttatttgtgggacagggctgtgttgagacttggcatgcttctttt |
| 3176 | NM_006231 | POLE | ccttcaagactttgatattcgagcaattctggattgggactactacattgagcggctggg |
| 3177 | NM_006235 | POU2AF1 | gaccccattaagcctaaaggtgatgggtcctcgcctaggcttagtgctaccatgtgggtt |
| 3178 | NM_006255 | PRKCH | gaattgcaggccactcatgtcagtgaccagatttgtggcttataaacattagcagtttat |
| 3179 | NM_006263 | PSME1 | taatgcccgcgcgcgctggtgggcgctttataataaagcggagcatttacacacacccgc |
| 3180 | NM_006268 | DPF2 | gtcttcacaccctgattcctcaagttttctgcttagtggcactgacattaagtagtgggg |
| 3181 | NM_006273 | CCL7 | agctttggagtttgggttttcttgtccaggtgcttcataaagtcctggacccacttctgt |
| 3182 | NM_006286 | TFDP2 | tcttagaattgagattgctacacggagcagtccttgacgatcgtgtttctgacgtttctc |
| 3183 | NM_006299 | ZNF193 | gttctactgttttcagtttcatattacccctatatgcatcaaagctgcaacttcccttgc |
| 3184 | NM_006301 | MAP3K12 | cctgtcttaaggcccagggggaggttaggagactgatagcatgtgatggctcaggctgaa |
| 3185 | NM_006302 | GCS1 | accctacttttgcctgtagcccatatgctagaggttggtgaccctgacgacttggctttc |
| 3186 | NM_006325 | RAN | gtccacatgggaccggaacatttaaggccaggccctagagggtgggtttaagcccccaaa |
| 3187 | NM_006329 | FBLN5 | catgcctggtattttcaaccataaaagaagtttcagttgtccttaaatttgtataacggt |
| 3188 | NM_006343 | MERTK | aaagtttgcctgacgttcggaaccaagcagacgttatttacgtcaatacacagttgctgg |
| 3189 | NM_006354 | TADA3L | gcacctcccctcgcaatcagaacaagcccttcagtgtgccgcatactaagtccctggaga |
| 3190 | NM_006355 | TRIM38 | gtgtgagagaagggttaagactggcttacaatgagatgcttcaaatgaaaagggaattat |
| 3191 | NM_006362 | NXF1 | tacgatacaacccctataccacccgacctaaccgtcggggtgatacttggcatgatcgag |
| 3192 | NM_006427 | SIVA | agcgctcggtgttcacactgaactgtggggtcgacgggaggggtgccttttacatgttct |
| 3193 | NM_006472 | TXNIP | tgtgtgaagttactcgtgtcaaagccgttaggatcctggcttgcggagtggctaaagtgc |
| 3194 | NM_006495 | EVI2B | acaatcatttccaccgcttgactcacttaacttgcccctgccaccagtagattttatgaa |
| 3195 | NM_006509 | RELB | aaggtggggggtaggttggttgttcagagtcttcccaataaagatgagtttttgagcctc |
| 3196 | NM_006534 | NCOA3 | caattttcctctccaaggaatgcacccacgagccaacatcatgagaccccggacaaacac |
| 3197 | NM_006559 | KHDRBS1 | agttaaagtcctaattggatttgtaccgtcctcccattttgttctcggaagattaaatgc |
| 3198 | NM_006565 | CTCF | gtgagctttgcagttacacgtgtccacggcgttcaaatttggatcgtcacatgaaaagcc |
| 3199 | NM_006579 | EBP | acttgtgtacctaagtgaccgccccacctgtggcttatacgtggcgtggcctctttcttc |
| 3200 | NM_006591 | POLD3 | ttggttggagttccatcttgcaagggataatacaaatcctatgatctctatgcccaatat |
| 3201 | NM_006602 | TCFL5 | tggcctgcagcaagccatcgtggttggctggaactagacgtgtgatttgaatgcaggagt |
| 3202 | NM_006676 | USP20 | actcattgctgattggaacaccaggaggaggttggatttctgccagtgggggatgtttct |
| 3203 | NM_006739 | MCM5 | ttgtgaagtgcggaaaaccagaggcgcagtcatgtcgggattcgacgatcctggcatttt |
| 3204 | NM_006747 | SIPA1 | agcctgggaacctctcagagaaggtctctcacttggagtccatgctcaggaagctgcagg |
| 3205 | NM_006748 | SLA | gccctgaatggaactactttaactaatccatagggacttctggtatgctttcctctcttt |
| 3206 | NM_006759 | UGP2 | agcaaaataggaaacggggtcgcataggacaatctctagtgcttgtaaatctaaggaaat |
| 3207 | NM_006762 | LAPTM5 | tcaacgctttaggctgagtcactcctcgggtctctccataattcagcccaacaatgcttg |
| 3208 | NM_006769 | LMO4 | accagaaggtctgctaaaaggtcagagtaatgcagaatgcgtgccttcatctcagatttg |
| 3209 | NM_006803 | AP3M2 | agattttccctcaaagaccatgatggtatcggactagttttcagacactgcctgttgctg |
| 3210 | NM_006820 | IFI44L | ctctataagtctagtgttcatggaggtagcattgaagatatggttgaaagatgcagccgt |
| 3211 | NM_006825 | CKAP4 | gggcagccctgtcggcaaggagcgtgcatactgcgtttgtgtaattgtttgctgtatctc |
| 3212 | NM_006845 | KIF2C | ggtctcgctatcaagatccaacgcagtaatggtttaattcacagtgccaatgtaaggact |
| 3213 | NM_006857 | RY1 | aatcgaaaaggtggattcaacagacctttggatttcattgcatgagaattgaagtgttga |
| 3214 | NM_006875 | PIM2 | aggggaaataaggcttgctgtttgttctcctggggcgctccctccaacttttgcagattc |
| 3215 | NM_006904 | PRKDC | ggcgtgatcgggatcgactttgggcatgcgtttggatccgctacacagtttctgccagtc |
| 3216 | NM_006910 | RBBP6 | tcttccaaagaggctagaacgtcagataaacatgattccactcgtgcttcctcaaataaa |
| 3217 | NM_006931 | SLC2A3 | cctagatctttcttgaagacttgaattagattacagcgatggggacacagaaggtcaccc |
| 3218 | NM_006932 | SMTN | agggggttgtagagcgactgcacataggggaaaacacacttggggtcaggctttttgccc |
| 3219 | NM_006937 | SUMO2 | atgcaagtatactagcagaaaaattgggccatagtatcgtggatttccaggtattttctg |
| 3220 | NM_006938 | SNRPD1 | gaaacgctgagtattcgaggaaataacattcggtattttattctaccagacagtttacct |
| 3221 | NM_006963 | ZNF22 | gatgctttatagtagatcacttaaatactggatcttttgctagtgtgaaaacattgggaa |
| 3222 | NM_006981 | NR4A3 | cttcagttatagtaactgactggtatattcattcagaagcgccataagtcagttgagtat |
| 3223 | NM_006994 | BTN3A3 | aaaatccagtacatggctcgtggagagaagtctttggcctatcatgaatggaaaatggcc |
| 3224 | NM_007022 | CYB561D2 | tatgctttcaggctacaaccactagcacggctgacgatggccctttctgcggagaccgag |
| 3225 | NM_007063 | TBC1D8 | gcccgattacttcaaccaccgagtgatcggggcacaagttgaccagtctgtcttcgagga |
| 3226 | NM_007065 | CDC37 | tgtctgtgtcttctatttggcaaacagcaatgatcttccaataaaagatttcagatgctc |
| 3227 | NM_007079 | PTP4A3 | gcaccttaaattattagaccccggggcagtcaggtgctccggacacccgaaggcaataaa |
| 3228 | NM_007117 | TRH | cgcttatgtcggtgtcccaacgtataaactatcacagtagcgctcatggctcgtaggttt |
| 3229 | NM_012092 | ICOS | tgagccagaggccactaggtattcttgctcccagaggctgaagtcaccctgggaatcaca |
| 3230 | NM_012120 | CD2AP | aatgggatgagggaagtttccagcagatttcaggctgttcttaaagtttttgttggtcat |
| 3231 | NM_012207 | HNRPH3 | caaaaacaccaacatacaagtcttgacaacagcatctggtctactagactttcttacaga |
| 3232 | NM_012223 | MYO1B | gaagcagtcacgaccattgctgcatattggcatgggacccaggtacgtagagaatacagg |
| 3233 | NM_012267 | HSPBP1 | ataaggggggcttacacagttgccctaatgcggctggaatccccattgggggtaggtgag |
| 3234 | NM_012317 | LDOC1 | caaccgcccgtttgatcgccgggcgtggtgattttttgtgagctccgcacacctactttc |
| 3235 | NM_012323 | MAFF | ttattgtgccaatatgccctccaaaccctcccaggattcaaagctaggtttggctgtctg |
| 3236 | NM_012334 | MYO10 | agaaatttgccttgtccctttgtgtacaaccatgcaaaactgtttgttggctcacagaag |
| 3237 | NM_012384 | GMEB2 | attaattcccaatcccccattccaccagggctgggagcccattcccagtgcttcccaagg |
| 3238 | NM_012417 | PITPNC1 | agtgtctgagatatccaggagattcattaggtcatcagcgatcaaaggttagcattttat |
| 3239 | NM_013282 | UHRF1 | tacaggggcaaacagatggaggacggccataccctcttcgactacgaggtccgcctgaat |
| 3240 | NM_013314 | BLNK | gcctgacctgatgaactgttaatatctggtgaggttgagttatcatgctactaatatttt |
| 3241 | NM_013416 | NCF4 | tgaacagttttcactggggttgagatcaaatcacagaacagtgtcaggggccctggaagg |
| 3242 | NM_014005 | PCDHA6 | atttgtctcccgccctaagtcctccagtctccttagagctagtacttactaagcatttac |
| 3243 | NM_014207 | CD5 | aaagctctttcatctatagtttggccaccatacagtggcctcaaagcaaccatggcctac |
| 3244 | NM_014232 | VAMP2 | tctattgtctttttaaatggcacaattttaagggtttgagggtacagtcccttaacctgc |
| 3245 | NM_014244 | ADAMTS2 | gaacaatacaccctctccgcccttggggtaatgtactttgtgatattgccacccgccccc |
| 3246 | NM_014298 | QPRT | aaaggatcaaccacatggggttctgcggtgataatgagcacatagtgaggggtcagcaaa |
| 3247 | NM_014345 | ZNF318 | tgaccactgttcctcagttgaccaccgcttctcagctgaccgctgttcctcagttgacca |
| 3248 | NM_014365 | HSPB8 | ggtgatatacaggtcttatatccccatatggaatttatccatcaaccacataaaaacaaa |
| 3249 | NM_014575 | SCHIP1 | accagcaattatgtgacctgctttcgatcataagactgtgttaagaccttctcctcagtg |
| 3250 | NM_014595 | NT5C | ccccggaaagatgattttgatcaagcacaggtaatcaggactgtcctcaggactttatgt |
| 3251 | NM_014614 | PSME4 | acatgaaagcacccagcgatgtgttgcagaaattatagctggtttaatcagaggttctaa |
| 3252 | NM_014624 | S10OA6 | tcgatcgcgatgtaagtcgcgagccggcaatcgcgtgtgcacatactcgcagatccttct |
| 3253 | NM_014667 | VGLL4 | tgtcagttacagtcctagatatacttactgctggtacagttgtactctaagattggtatt |
| 3254 | NM_014707 | HDAC9 | ctgcaagaaactgggctgctaaataaatgtgagcgaattcaaggtcgaaaagccagcctg |
| 3255 | NM_014724 | ZNF305 | aaatttgagactacctttatattctccaacacaagaccgtgtaggtgtcccttcagagag |
| 3256 | NM_014734 | KIAA0247 | catggagattagctgccgtctcaacgaggataaagacacccacacatcacttggggtccc |
| 3257 | NM_014735 | PHF16 | caaacatcaaaacagtgcttcagccaaattccatatgtaatgccattgggagagtattga |
| 3258 | NM_014780 | CUL7 | aaggaacccaggtcgagatgggacattgtgcggctcatcccacctcagacgtacctgcaa |
| 3259 | NM_014792 | KIAA0125 | acgggcacatacaggaaaacacggtaatgtaattagaatagtcagagaaaagtagccaga |
| 3260 | NM_014824 | FCHSD2 | aagttaaaagcccggcgatctgagtgtaattccaaagctacccacgcaaggaatgattat |
| 3261 | NM_014890 | DOC1 | cagacttttaaggcattccaaatcccagtcttcatgttgaactgggttaagcatttatta |
| 3262 | NM_014899 | RHOBTB3 | tataatattgggaccccataccgttagcccttgtatgtataccaacactgccaaagtaaa |
| 3263 | NM_014914 | CENTG2 | agcagtggagagctcggctcaaagtgcgaagttgtttagatttccacgttacacaaacac |
| 3264 | NM_015050 | KIAA0082 | ccaattctgggtatatcagtgtgtcttgcagaatcttggatcattaaagataaacatatt |
| 3265 | NM_015069 | ZNF423 | atggtctgcttttaaatgtgacttaatctgactgcagtaactagtacagttcaataaagg |
| 3266 | NM_015099 | CAMTA2 | atcccggtggacatgatctcactagccaagcagatcatcgaagccacaccggagcggatt |
| 3267 | NM_015147 | KIAA0582 | ggagaacaccccagttttagaggatgtccttgggaggatcgcaaagcagtctggtgagct |
| 3268 | NM_015149 | RGL1 | gggagaacctactcaagaggtgtctaaattcaaactttccaccaaggtagaaagcacggg |
| 3269 | NM_015158 | ANKRD15 | ctctttgtatttatggattcctttttaccgtgtcacatttactttggtcctctatgtatt |
| 3270 | NM_015166 | MLC1 | aagacatgaacgttttctcttcaccgccgtggggtgtattgactggtcccccatgggctg |
| 3271 | NM_015196 | KIAA0922 | ccaatgtctggactttttggttccatctgggccccgcaaagcgatgtgtatgaaaattgc |
| 3272 | NM_015210 | KIAA0802 | aaagccgaccagccaaataacaggacgtcaccagggatggcccagaaagggtacagt |
| | | | gag |
| 3273 | NM_015261 | KIAA0056 | agaggtgatcagttcagctgttgacgccttgcagaggctttgtagagcatctgcagagac |
| 3274 | NM_015335 | THRAP2 | ggcattttcagtgtactgccagtgcaggcgaccactgcctacacagatccacattaaatc |
| 3275 | NM_015436 | RCHY1 | gatgatccagccgactttgacactgttatctccgtaatagctttaccattaggctaggat |
| 3276 | NM_015458 | MTMR9 | ctgaaacctcaagagtgctgtaaggtacaggtttccatattgtgaacctgtgtacgcaca |
| 3277 | NM_015474 | SAMHD1 | ggaatggaacgacagtacttcagtccaaaatccaactcgcctccgagaagcatccaaaag |
| 3278 | NM_015528 | RNF167 | cttcccctgttatcctggtctaataaccccccacacatacacctctggtgacctatttgc |
| 3279 | NM_015568 | PPP1R16B | cagatctttgatatcgtactgaggtaacttccacgtagccccttgccacgcggcaccggt |
| 3280 | NM_015570 | AUTS2 | aacagccgtaacaggtcaaccttgtggagccatcgcgagttagagggtgaaagatggcag |
| 3281 | NM_015636 | EIF2B4 | catgttgcgctggctaactggcagaaccacgcatccctacggttgttgaatctagtctat |
| 3282 | NM_015670 | SENP3 | agcatattgccaagtatctacaggcagaggcggtaaagaaagaccgactggatttccacc |
| 3283 | NM_015710 | GLTSCR2 | agttgtagctgccatcagatgccggagactcgcccttcaataaaaaatctcttctagctg |
| 3284 | NM_015833 | ADARB1 | cggttaaaagcacagtctatggaacgctaatggagtcagcccctaaagctgtttgctttt |
| 3285 | NM_015855 | WIT-1 | cagatacgtaggcccatgaaattgatgaactgagagttgcttccagtcctgagcgcacca |
| 3286 | NM_015869 | PPARG | agcccaatatttgcttaccaaactggacatcattgatgatctggattcaggcagggtctg |
| 3287 | NM_015965 | GRIM19 | aaatcgaggacttcgaggctcgcatcgcgctgttgccactgttacaggcagaaaccgacc |
| 3288 | NM_016041 | DERL2 | ccaacaccgtcatacatatacctccgctacgcaaccttacctagttacgccccaattgta |
| 3289 | NM_016091 | EIF3S6IP | tccggcggtgctcgcaagcgaggcagccatgtcttatcccgctgatgattatgagtctga |
| 3290 | NM_016184 | CLECSF6 | tgtgtaagggaggtccatagaatttaggtggtctgtcaactattctacttatgagagaat |
| 3291 | NM_016195 | MPHOSPH1 | atatctgtttggattatagctaggatttggagaataagtgtgtacagatcacaaaacatg |
| 3292 | NM_016221 | DCTN4 | aaaggtagacctgctgttaatgatccagcattggtcacaatgtaccaactgctttctgca |
| 3293 | NM_016308 | UMP- | ttatatagtgttattcatggttcagctgatcttaacaaaattcgtagcagtggaaccttg |
| | | CMPK | |
| 3294 | NM_016343 | CENPF | ctgacatcccgacaggaaagactagcccatatatcctgcgaagaacaaccatggcaactc |
| 3295 | NM_016570 | PTX1 | aacctgagctttaggacctttaaaatctcagcatgccttttaagctagtacttttcctgt |
| 3296 | NM_016734 | PAX5 | gaagcatcaagcctggggtaattggaggatccaaaccaaaggtcgccacacccaaagtgg |
| 3297 | NM_017437 | CPSF2 | ttgcgtctttcttgtgactaaccaccctgatatagtattaaccactgtgttcaagagtaa |
| 3298 | NM_017448 | LDHC | ggcggaatggtgtctcagatgttgtgaaaattaacttgaattctgaggaggaggcccttt |
| 3299 | NM_017617 | NOTCH1 | aatgagtctgttgtgtgtcatgccagtgagggacgtcagacttggctcagctcggggagc |
| 3300 | NM_017771 | PXK | aaaattcaagtacacacatcagtgttggttactatgcagagaatgtcattgtgtatagtt |
| 3301 | NM_017787 | C10orf26 | tcttcaatgacaggcttggactagctgtggcccagacatcggccctgcccagaattgcca |
| 3302 | NM_017794 | KIAA1797 | acacatgcctcctaagagaggagtgcattgctttagtacccgggccagttgagactgaaa |
| 3303 | NM_018136 | ASPM | ggcagctgtgatttccctccagtctgcttatcgtggctggaaggttcggaaacagattag |
| 3304 | NM_018209 | ARFGAP1 | tgtgctcgtcccaccctagggactcagccacttgcagaacaggatgggaccgagatttca |
| 3305 | NM_018248 | FLJ10858 | ataagccctcttctaaggcatgtgatgcttgcttgacctcaaggcctattgattcagtgc |
| 3306 | NM_018462 | c3orf10 | cggagaatagagtacattgaagctcgggtgacaaaaggtgagacactcacctagaacagt |
| 3307 | NM_018664 | SNFT | aggggctgttgtgagcccattggtatagcaactagtggtgctgtctactgcaaagcaaat |
| 3308 | NM_018951 | HOXA10 | gtaagcggaataaactagagaagggagacattgtttggatttcctttatactgtgaagtt |
| 3309 | NM_019028 | ZDHHC13 | ggaagacaccatacaatcttggattcatgcagaacctggcagatttctttcagtgtggct |
| 3310 | NM_019071 | ING3 | taaccaagattgccctatagaatggttccattatggctgcgttggattgacagaggcacc |
| 3311 | NM_019102 | HOXA5 | agatcatagttccgtgagcgagcaattcagggactcggcgagcatgcactccggcaggta |
| 3312 | NM_019111 | HLA-DRA | ccaactatacttcgatcaccaatgtacctccagacgtaactgtgctcacaaacagccctg |
| 3313 | NM_019841 | TRPV5 | ctaccatttttgattaacatcgctatcactcttgaccttactcccggttggcctgggggc |
| 3314 | NM_019846 | CCL28 | aacacgaaacatacggccataaaactccttattagagagtctacagataaatctacagag |
| 3315 | NM_019857 | CTPS2 | cgttttccccgtactagatggttagggcgcatagtgccgaactacgctgctgctacagaa |
| 3316 | NM_020310 | MNT | tggctccacggtcatcgcccacacagctaccactcacgcttcagtcatccagactgtgaa |
| 3317 | NM_020368 | SAS10 | gagaatgcatctttgacagttatcttatttgtaaggcagcctataaaatagttctgaagt |
| 3318 | NM_020371 | AVEN | caggaccagccagtttacaagcatgtctcaagctagtgtgttccattatgctcacagcag |
| 3319 | NM_020631 | KIAA0720 | agcaccatgcattatgatgggcatgtccgcttcgaccttcccccacaaggctctgtgctg |
| 3320 | NM_020657 | ZNF304 | attcgaacattctagaggggacatccacaagtctcggtgcagttatgatggtgtgggatg |
| 3321 | NM_020841 | OSBPL8 | tggatccattactcaacccttacctagcagttatttgatcatccgagctacttcagagtc |
| 3322 | NM_020843 | ZNF291 | caagattaccttcttaatggacctcctgatacaccagttgacggtttatgttccagatga |
| 3323 | NM_020892 | DTX2 | tcagccacgatcctctggacagagatttgtggcgaagacctgacgagagactgtaaagga |
| 3324 | NM_020944 | GBA2 | aagacacctttcatcgacatgatcaattctgtacccctaagacagatttatggttgtccc |
| 3325 | NM_020956 | PRX | aggtgcagctgccgaaagtgtcagagattcggctgccggaaatgcaagtgccgaaggttc |
| 3326 | NM_020998 | MST1 | tctcctacccatacttggaggccccgctcagacggtcctgaaaacgtctgaaaggcggtt |
| 3327 | NM_021019 | MYL6 | aaggaccaggcacctatgaggattatgtcgaaggacttcgggtgtttgacaaggaaggaa |
| 3328 | NM_021038 | MBNL1 | cagacagacttgaggtatgtcgagagtaccaacgtggcaattgcaaccgaggagaaaatg |
| 3329 | NM_021071 | DO | cctttttgaccagtgtcatcatcttttccaaaagcagagtataaagaaatcttgtggctc |
| 3330 | NM_021103 | TMSB10 | ctctccgatttgtgtgtgcggcgttgtctttacttgtacgcctcccgtgagaccactctg |
| 3331 | NM_021111 | RECK | caaccctcgatgagaccatcaacaatctccatttccgttttcttggacatcaggattctc |
| 3332 | NM_021114 | SPINK2 | tcacccacctcactatactctcccttatcgcgcgtctatatggccccgatcacccttccg |
| 3333 | NM_021643 | TRIB2 | tggaagacgcctacattctgcggggagatgatgattccctctccgacaagcatggctgcc |
| 3334 | NM_021814 | ELOVL5 | acttatgtgtttgtggagatgttggtgtaaacctactgcactgctaattctataaaagta |
| 3335 | NM_021906 | USP9X | gaaaaactattcctaatcaacatggagtggagagtttattcactgtcttatctgcagaaa |
| 3336 | NM_021949 | ATP2B3 | ttcttctcactctctgtcgtagacacaccgataggaccaatggccaatagatattaaaag |
| 3337 | NM_021960 | MCL1 | tgatcctgttagcaggtggtaataccatgggtgctgtgacactaacagtcattgagaggt |
| 3338 | NM_022067 | C14orf133 | attttgcacaagaacaatgcccctgtgcagatattacaggagtatgtcaatctggtggaa |
| 3339 | NM_022127 | SLC28A3 | agtggatcatctggggaatgccatccccactgtagaaatgctgcctcaaaaatgttctgg |
| 3340 | NM_022161 | BIRC7 | gcaaacctggtcagagccagtgttccctccatgggacctaaagacagtgccaagtgcctg |
| 3341 | NM_022334 | ITGB1BP1 | ggagtccgtttttgaggtcacgcggctagtaattggagcctggtttagaaccaagtcagt |
| 3342 | NM_022366 | TFB2M | ccctggaagataggtagcaactagactgtcgtttttggtggagcggttcatttatttgga |
| 3343 | NM_022436 | ABCG5 | atgcagatgtccacacgaggggtcggagttacctgatcacatcgagagagtgctgggcag |
| 3344 | NM_022438 | MAL | aatgaagactttggatttattaaaaccaagttgtccctaaggaatcagatgtgggcatct |
| 3345 | NM_022469 | GREM2 | tacagaatgcaaacacgagcacactctcttcgaacccaattgtgggtgtagcaatgaaag |
| 3346 | NM_022549 | FEZ1 | cctggtatcacttgctcgctactttctagggtcttaatagtagtcaagaaaagggatctg |
| 3347 | NM_022716 | PRRX1 | ccagccatgcttttgtaacttgccaggtggacttgaccaactacattaccatgctgtgcc |
| 3348 | NM_024006 | VKORC1 | agctcccgcgactgctacgtgctcattagtgttcgtccgacgacgaccgtcatatgtcca |
| 3349 | NM_024319 | C1orf35 | taccagggatggcccctggcttggcctgcgaaggtgaacctgcccagatttatcagtaga |
| 3350 | NM_024408 | NOTCH2 | acagaccatatggatcgtcttccccgggatgtggctcgggatcgcatgcaccatgacatt |
| 3351 | NM_024424 | WT1 | tggaagtcgtttttcctaactaggactcaactatgaggggcgaggagccctttatgaaaa |
| 3352 | NM_024713 | C15orf29 | cagattattgcacgtctgtgatttgagaggtgagttatttaagaggccagttttcaggac |
| 3353 | NM_024728 | C7orf10 | ctctggtattaatgaatctagtgccttttaaatgtatcccacgttttgttccctaccatc |
| 3354 | NM_025263 | PRR3 | tggtggaaactcaagtgtgtctactttgtgagaactgggttgtgcacttaaaactggtgt |
| 3355 | NM_030660 | ATXN3 | catggaatgtaggtgtctgcttcacatcttttagtaggtatagcttgtcaaagatggtga |
| 3356 | NM_030674 | SLC38A1 | cagatgggtgatttaagtgagtcacaagtcacaaaactttgctattcatagttaatcaaa |
| 3357 | NM_030915 | LBH | aatgcctgttgtgagatgaacctcctgtaacttctatctgttcttttttgaggctcaggg |
| 3358 | NM_030926 | ITM2C | tgctaaccgttctcagccctgagccttggagaggagggctgtaacgccttcagtcagtct |
| 3359 | NM_030935 | THG-1 | cagcctggttcacaaatctccagaccccttcggagcagtagcagctcagaagttcagcct |
| 3360 | NM_031243 | HNRPA2B1 | caagacctcattcaattgatgggagagtagttgagccaaaacgtgctgtagcaagagagg |
| 3361 | NM_031423 | CDCA1 | tatttctaaacttgaaaactgctttggagaaataccacgacggtattgaaaaggcagcag |
| 3362 | NM_031966 | CCNB1 | tcttccagttatgcagcacctggctaagaatgtagtcatggtaaatcaaggacttacaaa |
| 3363 | NM_032121 | DKFZp564K142 | acaagttccgtcgccttgtgaaagccccaccgagaaattactccgttatcgtcatgttca |
| 3364 | NM_033238 | PML | accatgtgtgctgttttcagatgtgattgaggggtgttctgccctgcctccactgtcaca |
| 3365 | NM_033512 | TSPYL5 | ttgaggatgttcccaaagttttgtccaatcttatcattagtagattttataagccacaga |
| 3366 | NM_033554 | HLA-DPA1 | tacttggcgtcttagatcccccctcggagtagcggctcacgcaacacaaagtatagcaca |
| 3367 | NM_033642 | FGF13 | aatctgtgttccaaaagtggacatagcatgtacaggcagttttctgtcctgtgcacaaaa |
| 3368 | NM_057168 | WNT16 | gccttttcactgggagaatctggaaaaacctccataaggtatatagcaatctttgatctt |
| 3369 | NM_058195 | CDKN2A | atgtgtcacgatagatacatttcccgtatacttctgcgactatatctctctgtatttcta |
| 3370 | NM_080284 | ABCA6 | tctagttccactgtggaattcctttctggttgtacatttgctaggtagtgacaactaatg |
| 3371 | NM_080700 | TREX2 | gacatcagcaccctagaccagaagctgcgtctggtcacttccgacttccaccagctaatc |
| 3372 | NM_130439 | MXI1 | gttgtgtgttaatgttagactatccctttgtgagtgacactttaacagcattcactgctt |
| 3373 | NM_133259 | LRPPRC | aatccttagagagggtaaccaggaagttccgtttgacgtacctgagttgtggtatgaaga |
| 3374 | NM_133378 | TTN | cgagatgaatacgctccacccaaagccgaactggatgcccgattacacggtgatctggtt |
| 3375 | NM_138714 | NFAT5 | gtgagtttgtctgatgttctaccacaacgtggcgtctgataacagtgagggggggtgggg |
| 3376 | NM_144578 | C14orf32 | ggcactttcactgcctgtcactgatcagcagatactgacttgttgccattaagtgaactt |
| 3377 | NM_144628 | TBC1D20 | ccactcactaccttggcgtcgttttttgggtctgacttgtctcgtcaactgctggtctct |
| 3378 | NM_145698 | ACBD5 | ggatatagtgttcctgctttgtttaataagaacctcatttaaacttgacagctatggtat |
| 3379 | NM_145867 | LTC4S | gtcactagaactttaatgatagagactaggatgcggaagcgagcgcccctccccggggca |
| 3380 | NM_147180 | PPP3R2 | ccttgaactgagagcctgtatctggatttagcacttgaaagatctaactggatatttggg |
| 3381 | NM_152739 | HOXA9 | aatagttacctcaaggcctactgaccaaattgttgtgttgagatgatatttaactttttg |
| 3382 | NM_152788 | EB-1 | aacccaagatgcttgtgcaaaaatgcgggctaactgtcagaagtctacagagcaaatgaa |
| 3383 | NM_152827 | SNX3 | ttcctccaggcttgtaatacccttcacatggaagattaatgagggaaatctttatattct |
| 3384 | NM_152890 | COL24A1 | tttcacacccaggaacctaatcaacttccagtgattgaagtacaaaaacttcctcatctc |
| 3385 | NM_156038 | CSF3R | ttgtggcctataactcagccgggacctctcgtcccactccggtggtcttctcagaaagca |
| 3386 | NM_172020 | POM121 | tcaaccaagtatctgtgcaccccatggtcccttcaagttgacacttgaaattacccatca |
| 3387 | NM_173156 | C1orf16 | gagcccagggctaaaatcagtgctatctacaagccgaaatttaagcaacaactgtgacac |
| 3388 | NM_173216 | SIAT1 | gtacaatgaaggaatcctaattgtatgggacccatctgtataccactcagatatcccaaa |
| 3389 | NM_173609 | C15orf21 | aaggaccagccactttgaacgccttagaggcaaaaagagctttgtgagttgtaagaggaa |
| 3390 | NM_173852 | KRTCAP2 | ggatttctcctggactccatgtgcagatgcctagtatttccattctgaccgttgccctcc |
| 3391 | NM_175739 | SERPINA9 | agctaccgccaccaagttcatagtccgatcgaaggatggtccctcttacttcactgtctc |
| 3392 | NM_175744 | RHOC | caggggccttgtctctcactgcatttggtcaggggggcatgaataaaggctacaggctcc |
| 3393 | NM_178586 | PPP2R5C | tggaccccgttccgtaggcaataacgtgcgtccgcctcagcgcgagattaggagttcaaa |
| 3394 | NM_181311 | TAZ | gtgaacatgagttccgaattcctgcgtttcaagtggggaatcgggcgcctgattgctgag |
| 3395 | NM_181336 | LEMD2 | actttcagtctcgtcctgacacgattccaaaggtctgccatactcttcagaggagttcgg |
| 3396 | NM_181339 | IL24 | gagtatatgtaggaggtgggatatcacttccatgacataagtgctattgcagagccgtgg |
| 3397 | NM_181430 | FOXK2 | tatgtttgtatttggggtgtccctccggctctaggcggcctctgacctgctgtctactcc |
| 3398 | NM_181493 | ITPA | tgtcgtgtccatccttccttcgtctggctcgtgattcacttattcgccctccctactttg |
| 3399 | NM_181702 | GEM | atgcaggtcggggacgcatacctgattgtctactcaatcacagaccgagcgagcttcgag |
| 3400 | NM_182729 | TXNRD1 | cattcctgctactctacctgtatttctcagttgcagcactgagtggtcaaaatacatttc |
| 3401 | NM_182810 | ATF4 | ggaagaaaagggtcccctagttgaggatagtcaggagcgtcaatgtgcttgtacatagag |
| 3402 | NM_183395 | CIAS1 | gagccgaagtggggttcagataatgcacgtgtttcgaatcccactgtgatatgccaggaa |
| 3403 | NM_198232 | RNASE1 | cgcaacatgcaattatattaaactcggccaaaccctctgcgggataaaggggttttgttt |
| 3404 | NM_198400 | NEDD4 | ggtctggaagaaacatgtatcaagcaacacagccccttatcccagatagaaaagtgtctc |
| 3405 | NM_199335 | FYB | tgagctgtgtggtctgtccagctttcacacattgatatgtgaggctacatttgcatgtta |
| 3406 | NM_199423 | WWP2 | aagtggtgtccgcaaagcccaaggtgcataatcgtcaacctcgaattaactcctacgtgg |
| 3407 | NM_201592 | GPM6A | tatggaaattttgtctgaagatcagtggccatattactgtaggccctggttcatgttttc |
| 3408 | NM_201632 | TCF7 | aaagagaccgtctactccgccttcaatctgctcatgcattacccacccccctcgggagca |
| 3409 | NM_201998 | SF1 | cttgtaaagttgccgagggtaggttcatctccaggtttcgggattcccatccgtcctggc |
| 3410 | NM_212474 | FN1 | gggcaactctgtcaacgaaggcttgaaccaacctacggatgactcgtgctttgaccccta |
| 3411 | R14777 | CYFIP2 | ctgctgggccagcagcgtcgctttgacctgttcgacttctgttaccacctgctaaaagtg |
| 3412 | R56397 | PIK3C3 | gaaccagataaaactgtgaaaaaggttcaggataaattccgcttagacctgtcggatgaa |
| 3413 | R59027 | GRP58 | ctcattgaaactctttttgtggatttgatgaccttatggatattgccaaagtttaaggca |
| 3414 | R72151 | GNL3 | gctaaactgttctctgtataagttatggtatgcatgagctgtgtaaattttgtgaatatg |
| 3415 | R79128 | MAP3K1 | gtagcagcaatagtagtaatgctgttatacccagtgacgagacagtgttcaccccagtag |
| 3416 | R86893 | C6orf110 | tcgaagcccgcccgtgttacaacgtggctcgcctaatgttcctcgatgcagagaggaaga |
| 3417 | T07281 | NRIP1 | gcatacatccacagattcactttgtttatgcatatgtagatacaaggatgcacatataca |
| 3418 | T28925 | ITGAL | taatgattgacgtacttagcagctatctctcagtgaactgtgagggtaaaggctatactt |
| 3419 | U60115 | FHL1 | accgtgtagacacacgacatgcaagagttgcagcggctgctccaactcactgctcaccct |
| 3420 | U79271 | AKT3 | tttacattcatctggtttagacttaatatgccacaacgcaccacgaccttcccagggtga |
| 3421 | W04885 | MYL4 | tccgtgtaaccacatgcgcccaatgtccgtttgtctctcccgtgtgcgaaaaaacttgtg |
| 3422 | X66087 | MYBL1 | ggctcattgaacgatggtggtaatatggcgctaaaacatacaccactgaaaacactacca |
| 3423 | AK024272 | | ctttcacctcaagaggttgcgacaagctactccaatacccctgctgggatagtgtcacag |
| 3424 | AK025231 | IGLC2 | aaaatgtcaatggtgtgtctggctggctgatgggatttcacctaattttaatgtggcttt |
| 3425 | AL080190 | | ggctgaaccttatggacagtactgctgatttagtgatctgaccttgaattaggggtttca |
| 3426 | BU618233 | | ccaccatcagtgtatgagactgcctgattccctgtacattcattcctgtggctgctctaa |

TABLE 23
70mer polynucleotide probes, according to one embodiment

| | GenBank | | |
|---|---|---|---|
| | Accession | | |
| SEQ | No. for | | |
| ID NO: | Target gene | Symbol | 70mer |
| 3427 | AA594161 | MYH11 | atttcaccagatccatcctcactcctcgtatcaaggttgggcgagatgtggtacagaaagct |
| | | | cagacaaa |
| 3428 | AA766908 | MME | aatcgagtgagacaaaattttagtccaaataacaagtaccaaagttttatcaagtttgggtct |
| | | | gtgctgc |
| 3429 | AB014540 | SWAP70 | gctttggctaagatagatacttgtgaatcaaagatagcacagaaatgaactaagtatatccc |
| | | | atttggaa |
| 3430 | AF196185 | PARD3 | tggttctgtttcttaatcacgtgcggcggtgtctaagtggtgttaccagtgtacgcgcagtga |
| | | | ccttgga |
| 3431 | AI597616 | MRPL33 | cctgggatggaggaactgagtttgcaaatcagctccatcttcatatcaaggaatagtaaaat |
| | | | aagagaaa |
| 3432 | AI634809 | ARID5B | ccctgttcttcaaagcttagctggtcatatttctacttgcttccttttagcttctgccttgcttgtttta |
| 3433 | AI672553 | AKAP12 | atatgctggactgcattcacacatggcatgaaataagtcaggttctttacaaatggtattttga |
| | | | tagata |
| 3434 | AI809213 | RGS13 | ctctcctttcttcgaatgattcccatagaggatcactgtcagagctcgcctttcttctatctgcc |
| | | | ttata |
| 3435 | AK022231 | STAT1 | aggttaacgttcgcactctgtgtatataacctcgacagtcttggcacctaacgtgctgtgcgt |
| | | | agctgct |
| 3436 | AK022293 | CTSD | aggcacccctagctcttgggatgtttgtatccaactccgggcaatgtggggctacaaaggc |
| | | | ccctggctt |
| 3437 | AK055652 | C3orf6 | tgtataacatgataatgatgcctggtgtattgaaatcctcaataaatactgccaagtgtggatc |
| | | | agttgg |
| 3438 | AL080130 | FLJ14001 | ccacagtggtttctctctagtcagtaacaaaatttcattatggtttcaggcattatatggtggta |
| | | | aataa |
| 3439 | AL833316 | MIR | gcacagttagatgcaatgtttatagaaattgattgttaaaccaaatttacactggcatgtgtgg |
| | | | tgtagt |
| 3440 | AW291384 | STS-1 | atgcctcatagtttacctcagcggagtggtggtttccgagattacgagaaagatgctcccat |
| | | | cactgtgt |
| 3441 | BG993697 | SMYD3 | cttcactccctttcttgaaaacctcctgtagttcctgttgtgtacgggataaaggtgcttaccat |
| | | | ggggc |
| 3442 | BI769730 | HLA-DRB1 | aggtataaaggtcccttacgatacctcgctgtcccgtcatcgtcaatatctaggacggcata |
| | | | gtgaccac |
| 3443 | BQ632574 | RASA1 | gttgaccgctcctccaactaaccagtggtatcacggaaaacttgacagaacgatagcaga |
| | | | agaacgcctc |
| 3444 | BX504817 | SFRS7 | aacttgggaatactggtctgcatcaagtttattcggtagtttgaccgctagtatgttggaagtt |
| | | | atttgg |
| 3445 | H53164 | IRF8 | tgggatgccttactttgcacttaatttaataagggcattctcggaggagtagacgtttaatacg |
| | | | aagtgg |
| 3446 | H57732 | TGFBR2 | ttcctgagagcatgagggcccctagacagagtacaaggtgtaattcagacagccagcca |
| | | | gaaaaagaatt |
| 3447 | L29376 | 3.8-1 | ggttgcaggttgtttaaccttatatgtacagtttcacatatgtataaaaacagtagtttggggg |
| | | | cctctt |
| 3448 | M80899 | AHNAK | ctcctgatttggatattgagggaccagaaggaaagttgaaaggctccaaatttaagatgcc |
| | | | caagttgaa |
| 3449 | NM_000038 | APC | tcgttcgattgccagctccgttcagagtgaaccatgcagtggaatggtaagtggcattataa |
| | | | gccccagt |
| 3450 | NM_000043 | FAS | cctcctgaccaccggggcttttcgtgagctcgtctctgatctcgcgcaagagtgacacaca |
| | | | ggtgttcaa |
| 3451 | NM_000061 | BTK | atgtaaatagccgcacaaaggggtccaacagctctttgagtaggcatttggtagagcttgg |
| | | | gggtgtgtg |
| 3452 | NM_000075 | CDK4 | caggtaccaatagatgggacgacctcggtaaacacatgattcctgctcggaattgcctaac |
| | | | cttccaaac |
| 3453 | NM_000109 | DMD | gacatcaagtgtaattagcttttggagagtgggctgacatcaagtgtaattagcttttggaga |
| | | | gtgggtt |
| 3454 | NM_000189 | HK2 | tctcatcgatttcaccaagcgtggactactcttccgaggccgcatctcagagcggctcaag |
| | | | acaaggggc |
| 3455 | NM_000237 | LPL | agagatgatcgtgcctataaatagtaggaccaatgttgtgattaacatcatcaggcttggaat |
| | | | gaattct |
| 3456 | NM_000269 | NME1 | cacgggatgcatagcgtcgcacgcgatcgggtcgcgtctactaatgcttcgatatctatac |
| | | | gtcgcacac |
| 3457 | NM_000271 | NPC1 | ttctagccctctcgcagggcatcctgactgaactgtgtctaagggtcggtcggtttaccact |
| | | | ggacgggt |
| 3458 | NM_000295 | SERPINA1 | ggatgaggttgagtcataccaaatagtgatttcgatagttcaaaatggtgaaattagcaattc |
| | | | tacatga |
| 3459 | NM_000313 | PROS1 | aggaatcttcttcttggcagctgcagtctgtcaggatgagatatcagattaggttggataggt |
| | | | ggggaaa |
| 3460 | NM_000397 | CYBB | tagtgacagtattgacatctgagcatactccagtttactaatacagcagggtaactgggcca |
| | | | gatgttct |
| 3461 | NM_000405 | GM2A | ccccacggtcccgctttaaggtccataaatatccctaaggaaaaatccaccgtggtacattc |
| | | | agtcctct |
| 3462 | NM_000424 | KRT5 | gaagggataaaaagggggcatcaccgttcctgggtaacagagccaccttctgcgtcctgc |
| | | | tgagctctgt |
| 3463 | NM_000483 | APOC2 | agaagacatacctgcccgctgtagatgagaaactcagggacttgtacagcaaaagcaca |
| | | | gcagccatgag |
| 3464 | NM_000576 | IL1B | tgcccgtcttcctgggagggaccaaaggcggccaggatataactgacttcaccatgcaatt |
| | | | tgtgtcttc |
| 3465 | NM_000579 | CCR5 | ctaaaaccatcatagtacaggtaaggtgagggaatagtaagtggtgagaactactcaggg |
| | | | aatgaaggtg |
| 3466 | NM_000584 | IL8 | gtgctgtgttgaattacggaataatgagttagaactattaaaacagccaaaactccacagtc |
| | | | aatattag |
| 3467 | NM_000585 | IL15 | tttctcttggagttacaagttatttcacttgagtccggagatgcaagtattcatgatacagtaga |
| | | | aaatc |
| 3468 | NM_000600 | IL6 | gcaaagaggcactggcagaaaacaacctgaaccttccaaagatggctgaaaaagatgg |
| | | | atgcttccaatc |
| 3469 | NM_000626 | CD79B | acagccacctatgaggacatagtgacgctgcggacaggggaagtgaagtggtctgtagg |
| | | | tgagcacccag |
| 3470 | NM_000627 | LTBP1 | aagtcctctgaagacaatgagaggatttaggatgagcccgataggtgtggcagaccaaat |
| | | | ggacatttct |
| 3471 | NM_000633 | BCL2 | gaggtggctgatattctgcaacactgtacacataaaaaatacggtaaggatactttacatgg |
| | | | ttaaggta |
| 3472 | NM_000655 | SELL | aaatttcatctcaggcctccctcaaccccaccacttcttttataactagtcctttactaatccaa |
| | | | cccat |
| 3473 | NM_000713 | BLVRB | catgacggcccggataacagcgacaatcgaacgctgaccgcttagaccttcgtgagtag |
| | | | ctcggtgtcgt |
| 3474 | NM_000785 | CYP27B1 | tttgtcttgcccctaggaaggtgaatctgccctagcctggtttacggtttcttataactctccttt |
| | | | gctc |
| 3475 | NM_000788 | DCK | tccctggtgcctctcacttcgttggtgaccagtttcttaaactgaaagctttaatgttacatagt |
| | | | aaatg |
| 3476 | NM_000853 | GSTT1 | aaagagaatataggcccgtggcagatacagaggttttctgcccttttggcctgcatgccca |
| | | | acctttggg |
| 3477 | NM_000877 | IL1R1 | agaaaatgccagaatcgattaaattcattaagcagaaacatggggctatccgctggtcagg |
| | | | ggactttac |
| 3478 | NM_000917 | P4HA1 | cctaccactgcagacgaatgtcagcgtcacataaaaagagcatgtaggatgggacatatt |
| | | | gggatgtatt |
| 3479 | NM_000927 | ABCB1 | atcctcaccaagcggctccgatacatggttttccgatccatgctcagacaggatgtgagttg |
| | | | gtttgatg |
| 3480 | NM_001067 | TOP2A | atcagataggagcagtgacgaaagtaattttgatgtccctccacgagaaacagagccacg |
| | | | gagagcagca |
| 3481 | NM_001068 | TOP2B | tcactggtgtcaagatgtatgagaaggcatatatatagtgaatttcacttcttaacttgttctca |
| | | | agtgt |
| 3482 | NM_001110 | ADAM10 | gacatgtatttcttacgtacactgtacttctgtgtgcaattgtaaacagaaattgcaatatggat |
| | | | gtttc |
| 3483 | NM_001154 | ANXA5 | cgtgtatgtgttggtcatgagcatgctagtatgaataaggcaatgtgttaagcactggcatac |
| | | | aaatgca |
| 3484 | NM_001166 | BIRC2 | attcggaagaacagaatggctctctttcaacaattgacatgtgtgcttcctatcctggataatc |
| | | | ttttaa |
| 3485 | NM_001196 | BID | aaacgaagttgaaaaagtcaagcccctgtgtactggggccggacttcccatcatttgagtg |
| | | | cagcacttt |
| 3486 | NM_001230 | CASP10 | tctgttaattcctggaactgtattttgaatccttaaaggtgagccctcatagggagatccaaa |
| | | | gtcctgt |
| 3487 | NM_001238 | CCNE1 | tccacattatcagttgacagtgtacaatgcctttgatgaactgttttgtaagtgctgctatatcta |
| | | | tcca |
| 3488 | NM_001242 | TNFRSF7 | ttgtcaccatcaggcaaggcacctgaattcccaccgcagagagtgttgtggccgtgagga |
| | | | cttttctgtc |
| 3489 | NM_001254 | CDC6 | ggcactcccaagggcgttggggtcataaggagactataactctacagattgtgaatatattt |
| | | | attttcaa |
| 3490 | NM_001350 | DAXX | tatgtgagctgaaagactgctcttcactgaccggccgtgtcatagagcagcgcatccccta |
| | | | ccgtggcac |
| 3491 | NM_001425 | EMP3 | tgttgtgcgtgttatagatcttgttcccccccgcacctttcccgccgcgttttggcttcttccct |
| | | | ctgtt |
| 3492 | NM_001552 | IGFBP4 | ggtagcagatggagtaatggtcacgaggtccagacccactcccaaagctcagacttgcc |
| | | | aggctcccttt |
| 3493 | NM_001558 | IL10RA | tactcttaggtgccagtctggtaactgaactccctctggaggcaggcttgagggaggattc |
| | | | ctcagggtt |
| 3494 | NM_001618 | PARP1 | aagttgctgatgggtagtacctgtactaaaccacctcagaaaggattttacagaaacgtgtt |
| | | | aaaggttt |
| 3495 | NM_001621 | AHR | tccacagtcagccataataactcctcagacatgttatgctggggccgtgtcgatgtatcagt |
| | | | gccagcca |
| 3496 | NM_001663 | ARF6 | gatgtagttaaattgaacaataaccattggtgactggagcaggtaattatagcctgcagaaa |
| | | | aaattatc |
| 3497 | NM_001706 | BCL6 | tttttcacggaagttttcaatgatgggcgagcgtgcaccatccctttttgaagtgtaggcaga |
| | | | cacaggg |
| 3498 | NM_001760 | CCND3 | gtctagagagggaggcaagccctgttgacacaggtctttcctaaggctgcaaggtttaggc |
| | | | tggtggccc |
| 3499 | NM_001762 | CCT6A | aagaacaggcagaggtaaaaagatgatggaaggtgtggtgactaagggccacggttatt |
| | | | gggtgaaattt |
| 3500 | NM_001770 | CD19 | ttgttgccccgggccacagctcaagacgctggaaagtattattgtcaccgtggcaacctga |
| | | | ccatgtcat |
| 3501 | NM_001771 | CD22 | ggctcagagccagtctttttggtgagggtaaccccaaacctccaaaactcctgcccctgttc |
| | | | tcttccac |
| 3502 | NM_001779 | CD58 | caaagaacaagcattagttttggctgtcatcaacttattatatgactaggtgcttgctttttttgt |
| | | | cagt |
| 3503 | NM_001781 | CD69 | gttggaaaatgtgcaatatgtgatgtggcaaatctctattaggaaatattctgtaatcttcaga |
| | | | cctaga |
| 3504 | NM_001782 | CD72 | aattgtcctcacctaatccagtacctccttacgctttagtcagtcaaatcttgtatttcagcctgt |
| | | | gatg |
| 3505 | NM_001826 | CKS1B | tccccgttataaccgcaccgatacccgcctccgctaatcggatgaaacccctgcacactat |
| | | | tgtcagtaa |
| 3506 | NM_001827 | CKS2 | ttattttatcatcgcgcgaccagctaaacactcctgcggtcgtatggtcgacaacaatcaca |
| | | | cataaaat |
| 3507 | NM_001831 | CLU | ggtaagtattttagcatggctgtcaaggaaattcagagtaaagtcagtgtgattcacttaatg |
| | | | atataca |
| 3508 | NM_001852 | COL9A2 | gtcgaagcgctgaaggaatagggcggctttccttccagcgagcatcattcggctgttacca |
| | | | aaacaaaca |
| 3509 | NM_001853 | COL9A3 | ataaaattcaacgtgaggaagcaagtgacaaggacgcccgaagcacagtggacggtcat |
| | | | gaaggagcggg |
| 3510 | NM_001877 | CR2 | atggctctaaaagttttgccctttttaaggaggcactaaaaagagctgtcctggtatctagac |
| | | | ccatctt |
| 3511 | NM_001888 | CRYM | cttaaatgctgagatcctcatttatgtttgtagttggaaagcaaagctaggtagccatttcttct |
| | | | gttct |
| 3512 | NM_001894 | CSNK1E | ctctgcaaaggctatccctccgaattctcaacatacctcaacttctgccgctccctgcggttt |
| | | | gacgaca |
| 3513 | NM_001951 | E2F5 | gacaaaagaaataccagatcaatctaaagagtcattcaggacctatccatgtgctgcttata |
| | | | aataaaga |
| 3514 | NM_001967 | EIF4A2 | ggctcgtggccggaacccgtttcttgcggaggaattttctcgccgtgcttcggtcagctaca |
| | | | aaattgtg |
| 3515 | NM_002002 | FCER2 | accaagcatgccagccacaccggctcctggattggccttcggaacttggacctgaaggg |
| | | | ggagtttatct |
| 3516 | NM_002051 | GATA3 | tttttaacatcgacggtcaaggcaaccacgtcccgccctactacggaaactcggtcaggg |
| | | | ccacggtgca |
| 3517 | NM_002095 | GTF2E2 | tcctggttcctttcttcctcgtttgttactttagagcaagtttgcccatagtcttgaatgcaatattt |
| | | | gt |
| 3518 | NM_002101 | GYPC | cccatctgcagtgagtaggaagaggtcccctcaacagaggtgagaggttgggccaagtc |
| | | | aagtcagtttg |
| 3519 | NM_002105 | H2AFX | cttgattggtcacgatccccgcctacccaccaatccttaacgcgcctcaccggaccttaac |
| | | | attccaccc |
| 3520 | NM_002120 | HLA-DOB | agctaagggctcagaaaggatatgtgaggacgcagatgtctggtaatgaggtctcaagag |
| | | | ctgttctgct |
| 3521 | NM_002122 | HLA-DQA1 | caaagacatgcctggggtaagccacccggctacctaattcctcagtaacctccatctaaaa |
| | | | tctccaagg |
| 3522 | NM_002189 | IL15RA | gttgaacaaggccacgaatgtcgcccactggacaacccccagtctcaaatgcattagaga |
| | | | ccctgccctg |
| 3523 | NM_002211 | ITGB1 | tttgagttgcccatcttgtttcacactagtcacattcttgttttaagtgcctttagttttaacagttc |
| | | | ac |
| 3524 | NM_002217 | ITIH3 | ctgattgatggtgtccacactgactacattgtccccaacctgttttgagtagacacaccagct |
| | | | cctgttg |
| 3525 | NM_002250 | KCNN4 | gttaatgccactgggcacctttcagacacactttggctgatccccatcacattcctgaccatc |
| | | | ggctatg |
| 3526 | NM_002305 | LGALS1 | catggaggccatcaactacatggcggcggatggagacttcaagattaagtgcgtggccttt |
| | | | gagtgaagc |
| 3527 | NM_002350 | LYN | atctattctctccaaaaatgcacccaactagctctatgtttacaaatggacataggactcaaa |
| | | | gtttcag |
| 3528 | NM_002358 | MAD2L1 | ctcgcgcgtacatgttcgtgccagaacatgttacaccactcctacgatggcttgcccgattc |
| | | | gatgcccc |
| 3529 | NM_002426 | MMP12 | gactctactattaagtttgaaaatagttaccttcaaaggccaagagaattctatttgaagcatg |
| | | | ctctgt |
| 3530 | NM_002467 | MYC | cagaaatgtcctgagcaatcacctatgaacttgtttcaaatgcatgatcaaatgcaacctca |
| | | | caaccttg |
| 3531 | NM_002526 | NT5E | tgaattcattctactcatactacacacccagttatggaatgtccagagttctcgaagaaaata |
| | | | aatgact |
| 3532 | NM_002567 | PBP | gagctgggcaaagtgccgacgcccacccaggttaagaatagacccaccagcatttcgtg |
| | | | ggatggtcttg |
| 3533 | NM_002646 | PIK3C2B | gtatcaatgatgcaattactaggctcaacttgaaatcgacctatgatgtggagatgttgcgg |
| | | | gatgccac |
| 3534 | NM_002661 | PLCG2 | agcctgccatcaaggacatttcttaagacccaactggcatgagttggggtaatttcctattatt |
| | | | ttcatc |
| 3535 | NM_002692 | POLE2 | ccatcttaccaaggccaccacttgctgaaagcatcactaatgaattcagacaaagggtacc |
| | | | attttcagt |
| 3536 | NM_002738 | PRKCB1 | aggattcacggtgcacatgctggcattcaacatgtggaaagcttgtcttagagggcttttctt |
| | | | tgtatgt |
| 3537 | NM_002752 | MAPK9 | tgacaagcggatctctgtagacgaagctctgcgtcacccatacatcactgtttggtatgacc |
| | | | ccgccgaa |
| 3538 | NM_002832 | PTPN7 | aatgcttctgcttggccttatggaggagctgctccttccttacagccttggggatggacttgc |
| | | | ccacacc |
| 3539 | NM_002838 | PTPRC | ccgttatgttgacattcttccttatgattataaccgtgttgaactctctgagataaacggagatg |
| | | | caggg |
| 3540 | NM_002891 | RASGRF1 | gcgcaaggacggcacgcgcaaaggctacctgagcaagcggagttcggacaacacaaa |
| | | | atggcaaaccaag |
| 3541 | NM_002892 | ARID4A | gataagaccagcattgaggatgtagcagttgaaagctctgagtctaactctcttgtttctattc |
| | | | cacctg |
| 3542 | NM_002943 | RORA | ataaaaaccagttccataacaatactgaggcattgtttcccctttttactacggtgaccatttgt |
| | | | attaa |
| 3543 | NM_002966 | S100A10 | tccgccgccactcataccaactatcggcaagaacgcaccgtttccgcacttcatttttaccc |
| | | | cgcgcttc |
| 3544 | NM_002967 | SAFB | tgggctaaatgtgccgtgggttccacgccgtgtgcgcaagttccctgtgtgaaagcacgtc |
| | | | tgtcttcca |
| 3545 | NM_003037 | SLAMF1 | gcttttggggcaagctacggaacaggtgggcgcatgatgaactgcccaaagattctccgg |
| | | | cagttgggaa |
| 3546 | NM_003088 | FSCN1 | tgctactttgacatcgagtggcgtgaccggcgcatcacactgagggcgtccaatggcaag |
| | | | tttgtgacct |
| 3547 | NM_003177 | SYK | ggctgcaagaaatgtgttgctagttacccaacattacgccaagatcagtgatttcggactttc |
| | | | caaagca |
| 3548 | NM_003217 | TEGT | cttgagaacttactaaaggcacttccttcctgttaaacccctgttaactctccataaatttggtg |
| | | | attct |
| 3549 | NM_003243 | TGFBR3 | tgcgtttgcagcctttgtgatcggagcactcctgacgggggccttgtggtacatctattctca |
| | | | cacaggg |
| 3550 | NM_003254 | TIMP1 | cctaaggcttggaaccctttatacatcttggtcatcttgatctcataacgctggtataaggtgg |
| | | | tctggt |
| 3551 | NM_003290 | TPM4 | gccccctctccaattcatgtgttgaagccctcgtctccatgtgatggtaattggtgttggggc |
| | | | ctttgga |
| 3552 | NM_003299 | TRA1 | ttgggagagacttgttttggatgccccctaatccccttctcccctgcactgtaaaatgtggga |
| | | | ttatggg |
| 3553 | NM_003332 | TYROBP | ctacagcgacctcaacacacagaggccgtattacaaatgagcccgaatcatgacagtca |
| | | | gcaacatgata |
| 3554 | NM_003362 | UNG | ggttaagattgctgtgagctttatcagataagagaccgagagaagtaagctgggtcttgttat |
| | | | tccttgg |
| 3555 | NM_003451 | ZNF177 | agaaaggatactaaatgaaacaacaggggagatacaatattatctggttgcactaatcctgt |
| | | | gctgctta |
| 3556 | NM_003648 | DGKD | aaacgcctcttgtattgtcatgtacatagtccatacctgagtgctgtacataagttgttctgtgt |
| | | | ataaa |
| 3557 | NM_003656 | CAMK1 | aggttgggccactcacagctgcatgatgaggtagaggtggcccccactctcatagatgtc |
| | | | atccagggct |
| 3558 | NM_003810 | TNFSF10 | agggacaacatccttaagtcaaaagagagaagaggcaccactaaaagatcgcagtttgc |
| | | | ctggtgcagtg |
| 3559 | NM_003875 | GMPS | tgccagagatctgtggttattcgaacctttattactagtgacttcatgactggtatacctgcaa |
| | | | cacctg |
| 3560 | NM_003959 | HIP1R | tttaatattccgagctagagctcttcttcctacgtttgtagtcagcacactgggaaaccgggc |
| | | | cagcgtg |
| 3561 | NM_004049 | BCL2A1 | gatgtggatacctataaggagatttcatattttgttgcggagttcataatgaataacacagga |
| | | | gaatgga |
| 3562 | NM_004073 | PLK3 | tgtggttcagcgaatgggttggcttctccaataagttcggctttgggtatcaactgtccagcc |
| | | | gccgtgt |
| 3563 | NM_004091 | E2F2 | tggtcgtgtctttatgagcaccatgtaagcctccttgtattgagataattgggcattaaacatta |
| | | | aactg |
| 3564 | NM_004117 | FKBP5 | gggtgtgtgagtggttctgagcaaataactacagggtgcccattaccactcaagaagaca |
| | | | cttcacgtat |
| 3565 | NM_004126 | GNG11 | tgacctttccccggagactttcttaagcaccatatagatacggttatgtttttaaagcctatgtg |
| | | | cctac |
| 3566 | NM_004184 | WARS | gtttcttcctgtgagttccattatttctatctcttatgggcaaagcattgtgggtaattggtgctg |
| | | | gcta |
| 3567 | NM_004271 | LY86 | ccaaacataggaagcggcaatcagcccgcgcgtggaaccgagacaagtaaacaagac |
| | | | gccagatctctga |
| 3568 | NM_004289 | NFE2L3 | ctttccatcttggcagccatcctttttaagagtaagttggttacttcaaaaagagcaaacactg |
| | | | gggatc |
| 3569 | NM_004322 | BAD | agctggagacctagcacccagaagatgagaccgcaattcgagaatcaaagggccggga |
| | | | gcgatggtgagc |
| 3570 | NM_004354 | CCNG2 | tttgggggagggttgttaaacagtaatagataagtgagacagattgcttgttatttatggtcaa |
| | | | atggtg |
| 3571 | NM_004356 | CD81 | tgtcctttctaacacgtcgccttcaactgtaatcacaacatcctgactccgtcatttaataaag |
| | | | aaggaa |
| 3572 | NM_004358 | CDC25B | tgattggagattactctaaggccttcctcctacagacagtagacggaaagcaccaagacct |
| | | | caagtacat |
| 3573 | NM_004422 | DVL2 | ttcggagacctcagtggtggctgtgagagctacctagtcaacctgtctctcaatgacaacg |
| | | | atggctcca |
| 3574 | NM_004445 | EPHB6 | tccgagaacttgcccgggaagtcgatcctgcttatatcaagattgaggaggtcattgggac |
| | | | aggctcttt |
| 3575 | NM_004510 | SP110 | acattgctgctcccatctttagaagcaatctaccatagttcaccctctggccacagtagttca |
| | | | catcttt |
| 3576 | NM_004529 | MLLT3 | acaaaagtgtacctgtaaatgtcctgaatccagcattgttgagctgtcatcaacattcttgtgt |
| | | | ctgttt |
| 3577 | NM_004556 | NFKBIE | ggcaggtgctcttgttttacccatgttgggtcagcctgaaactgccaaccagtaggaagcat |
| | | | ggactctc |
| 3578 | NM_004577 | PSPH | atcgatgagctagccaaaatctgtggcgttgaggacgcggtgtcagaaatgacacggcg |
| | | | agccatgggcg |
| 3579 | NM_004619 | TRAF5 | tcctgaagctgagcaagactgtccttttaagcactatggctgtgctgtaacggataaacgga |
| | | | ggaacctg |
| 3580 | NM_004635 | MAPKAPK3 | ggctgggaaaccctagaccatgtcagataggacaacactgctgggttttacatccagatag |
| | | | taataaaca |
| 3581 | NM_004737 | LARGE | ttgtccccgcgttcgagacactgcgctaccggctgtccttccccaagtcaaaagcggagtt |
| | | | gctgtcaat |
| 3582 | NM_004844 | SH3BP5 | tgttggatggcacagatgtagcacatgtcatcgtcacagaagttccgtcagccagcactgg |
| | | | agagcactt |
| 3583 | NM_004951 | EBI2 | ttgtttcgttctgggtcataaaactttgttaaggaactcttttggaataaagagcaggatgctg |
| | | | caaagt |
| 3584 | NM_005013 | NUCB2 | atttagatatgctaatcaaagcggcaacaagtgatctggaacactatgacaagactcgtcat |
| | | | gaagaatt |
| 3585 | NM_005077 | TLE1 | ccaagcggacagaggggccatgggttgtaggattgaggaacggaatctgccgactcaca |
| | | | tgacagcccat |
| 3586 | NM_005127 | CLECSF2 | catagcacttagacaggactttcatgacccaatatggaacaatttgagtaccagaatagga |
| | | | gattatggc |
| 3587 | NM_005211 | CSF1R | actcccccaagctgactcatcctaactaacagtcacgccgtgggatgtctctgtccacatta |
| | | | aactaaca |
| 3588 | NM_005213 | CSTA | ttgggtacatgctgctaaaagcccgtcagctcgtcatccttgtttttgtcaacctggtatccag |
| | | | taagta |
| 3589 | NM_005214 | CTLA4 | cagaacactgtcttgaagacaatggcttactccaggagacccacaggtatgaccttctagg |
| | | | aagctccag |
| 3590 | NM_005271 | GLUD1 | tatttggccagggccttttgaacagtagtgtccccatgaagtgctagataatatatgtgtaag |
| | | | agtcagc |
| 3591 | NM_005292 | GPR18 | aaaacaatttcaggctcgagtcattagtgtcatgctataccgtaattaccttcgaagcatgcg |
| | | | cagaaaa |
| 3592 | NM_005347 | HSPA5 | ctcaaaggctctcactaccgtggaccacctagtctgtaactctttctgaggagctgttactga |
| | | | atattaa |
| 3593 | NM_005348 | HSPCA | acttttcattccctgtagttgacaattctgcatgtactagtcctctagaaataggttaaactgaa |
| | | | gcaac |
| 3594 | NM_005415 | SLC20A1 | gaatgtgaacttcgggcaagttaaatgggacagccttccatgttcatttgtctacctcttaact |
| | | | gaataa |
| 3595 | NM_005449 | TOSO | acgcctttgccctgatccaaatgttagcacttgctagtgaacgtctacttatctcaagttctatg |
| | | | ctaaa |
| 3596 | NM_005461 | MAFB | ttcagtcccagctgtaggcttgtaaatacccgccccgccaaaccgcatagagaacgtggc |
| | | | agcaagctga |
| 3597 | NM_005531 | IFI16 | tgctttgaattggcaccgaaaagtgggaataccggggagttgagatctgtaattcatagtca |
| | | | catcaagg |
| 3598 | NM_005582 | LY64 | agcctgacatgcgacagcattgattctcttagccatcttaagggaatctacctcaatctggct |
| | | | gccaaca |
| 3599 | NM_005601 | NKG7 | gcgatatattctcgtccactcccccgctatccaacgtcacatctaagcactatgacatgcac |
| | | | cgaccgaa |
| 3600 | NM_005606 | LGMN | ttccggacccactgcttcaactggcactcccccacgtacgagtatgcgttgagacatttgta |
| | | | cgtgctgg |
| 3601 | NM_005610 | RBBP4 | atgcacaaatcgtcaaatctgaaaccatcttaacctcttccttagagtagctttctaattattct |
| | | | ccatt |
| 3602 | NM_005623 | CCL8 | aataggaaaattcctatccagaggctggagagctacacaagaatcaccaacatccaatgt |
| | | | cccaaggaag |
| 3603 | NM_005638 | SYBL1 | cacacctgaataaaattgatgtgcatgttttagggatcaattacctaactgttccttggtctattt |
| | | | atgt |
| 3604 | NM_005652 | TERF2 | tctgctgggctatgtaggcaggttaatcctccacttctcatgtggttgaaccagtgtgttttttg |
| | | | gtaaa |
| 3605 | NM_005658 | TRAF1 | gtcctagcaataacctcttgatccctactcaccgagtgttgagcccaaggggggatttgtag |
| | | | aacaagcc |
| 3606 | NM_005856 | RAMP3 | acttggaggaccccccagacgaggttctcatcccgctgatcgttatacccgtcgttctgact |
| | | | gtcgccat |
| 3607 | NM_005935 | MLLT2 | catcacaagaaaggtgaccgaagagctgacggagaccactgtgcttcggtgacagattc |
| | | | ggctccagaga |
| 3608 | NM_005950 | MT1G | cattatcaactagatactacacataccagcaccactactcacactacagcccactcaaaaa |
| | | | catcatcca |
| 3609 | NM_006006 | ZBTB16 | cctggatagtttgcggctgagaatgcacttactggctcattcagcgggtgccaaagcctttg |
| | | | tctgtgat |
| 3610 | NM_006014 | DXS9879E | accccaacgattacaacacaacaccagcgcccaatatacgcgaatgaggcgccctatac |
| | | | ccgcctctcca |
| 3611 | NM_006115 | PRAME | ccaggatgtgcatgcatcttgaagcaacaaagcagccacagtttcagacaaatgttcagtg |
| | | | tgagtgagg |
| 3612 | NM_006162 | NFATC1 | gtacaattagttgcttattacgtatgattactcacagcgatctattgttccatataaccaaaaag |
| | | | catgg |
| 3613 | NM_006164 | NFE2L2 | tgctcagttaggtcagacctggggccagttgcccatttagcatctcaggcctcaggatcctc |
| | | | atttataa |
| 3614 | NM_006195 | PBX3 | ccaatagaatttcaacatgttctgtagcttagagtgctcacttactacctctgaacaatactca |
| | | | cgctgt |
| 3615 | NM_006218 | PIK3CA | ggggatgatttacggcaagatatgctaacacttcaaattattcgtattatggaaaatatctgg |
| | | | caaaatc |
| 3616 | NM_006254 | PRKCD | cttttcctctgccttcggagggaaattgtaaatcctgtgtttcattacttgaatgtagttatctatt |
| | | | gaa |
| 3617 | NM_006257 | PRKCQ | cggatctcactcagccgcagacaagtaatcactaacccgttttattctattcctatctgtggat |
| | | | gtgtaa |
| 3618 | NM_006317 | BASP1 | gcagtacatcgtttgtacctgaaactgccgccacatgcactcctccaccgctgagagttga |
| | | | atagctttt |
| 3619 | NM_006332 | IFI30 | gagcaaaacttgatagctttgcatagggaaagagggcattgatgctggggttttgaaaggt |
| | | | gagtaggag |
| 3620 | NM_006475 | POSTN | gattcattacaattcaaatcgaagagttgtgaactgttatcccattgaaaagaccgagccttg |
| | | | tatgtat |
| 3621 | NM_006498 | LGALS2 | taatgccaccgccacgagggaactggcttacgctgttggcacatttccttccagacggttct |
| | | | ccacagat |
| 3622 | NM_006558 | KHDRBS3 | actgtgggaaaactcgagagcgctcaggaattgtaggtagcaattactgtaaaggtggatt |
| | | | tatggatta |
| 3623 | NM_006620 | HBS1L | ctgtgctgttacactaccaaactgtcagtgaacccgccgttattaaacgattgattagtgtctt |
| | | | aaacaa |
| 3624 | NM_006644 | HSPH1 | gatgaataatgtcatgaatgctcaggctaaaaagagtcttgatcaggatccagttgtacgtg |
| | | | ctcaggaa |
| 3625 | NM_006734 | HIVEP2 | atatgcaaagtcgatgagaatatgacccaaaggacactggtcaccaacgcagccatgca |
| | | | agggataggat |
| 3626 | NM_006763 | BTG2 | tcttgtctgcaaacaggtccctgcctttttagaagcagcctcatggtctcatgcttaatcttgtc |
| | | | tctct |
| 3627 | NM_006841 | SLC38A3 | aaaccaggagttcagctggctgcggcatgtgcttattgccgttggcctgctcacttgtatca |
| | | | acctgctg |
| 3628 | NM_006889 | CD86 | ccttgattagactcctagcacctggctagtttctaacatgttttgtgcagcacagtttttaataa |
| | | | atgct |
| 3629 | NM_006892 | DNMT3B | aagaagtcgtttttagggagaacgggaattcagacaagctgcatttcagaaatgctgtcata |
| | | | atggtttt |
| 3630 | NM_006986 | MAGED1 | aaagtgctgagattcattgcagaggttcagaaaagagaccctcgtgactggactgcacag |
| | | | ttcatggagg |
| 3631 | NM_007311 | BZRP | cccacccaagtgtctagcgggctcctcacactcaacatgtcctaaatgctgggtatcgcat |
| | | | gaagcactg |
| 3632 | NM_007360 | KLRK1 | ctccacaggaccaaaccatagaacaatttcactgcaaacatgcatgattctccaagacaaa |
| | | | agaagagag |
| 3633 | NM_007361 | NID2 | taactgcagtctacccctactgcccaacaggaagaaagtaagtacagtaatgtaaaggaa |
| | | | gacttggagt |
| 3634 | NM_012203 | GRHPR | gtgattctgatatatgtacttgtcacattggtgttggacacatttgcgccaaaagtatggtaatt |
| | | | ctatt |
| 3635 | NM_012448 | STAT5B | tctgttccagcaaccctggttggggggtcagacttgatacactttcaggttgggagtggacc |
| | | | caccccag |
| 3636 | NM_012452 | TNFRSF13B | tcgattcacccatcagcccatctccagcgctgtcccaattacagccctagcaagtggagac |
| | | | aacaagaag |
| 3637 | NM_013230 | CD24 | ccccgaagtcttttgttcgcatggtcacacactgatgcttagatgttccagtaatctaatatgg |
| | | | ccacag |
| 3638 | NM_014246 | CELSR1 | cttctgtgactccagtgactcagacgttagacctcttgatgttttcccactggtccctgaggct |
| | | | ctgttc |
| 3639 | NM_014257 | CD209L | cccagcttccagcggtactggaacagtggagaacccaacaatagcgggaatgaagactg |
| | | | tgcggaattta |
| 3640 | NM_014338 | PISD | tacaatgacttcagcttcgtgacgcacaccaatagagagggcgtccccatgcgtaagggc |
| | | | gagcacctgg |
| 3641 | NM_014456 | PDCD4 | ttgtaagtgccatgtttattatctaatcattccaagttttgcattgatgtctgactgccactccttt |
| | | | ctt |
| 3642 | NM_014686 | KIAA0355 | tctccatgggctgtgagactgtgtgaagccgtttgtgtggtctccatgtaggtgctgtgttcc |
| | | | cggcacc |
| 3643 | NM_014762 | DHCR24 | attgtcttagacactgtggttgcaaaacccacggaaagcctcatttgtgtggaaagtcagag |
| | | | gaaaaatg |
| 3644 | NM_015187 | KIAA0746 | tacatgctgctaaggtagtgaataaatcagtaatgcaatattgtgggtccaaactactctttgc |
| | | | actact |
| 3645 | NM_015641 | TES | ataaaagccaagccacccatttgcttttaatccaaagaacatgtatagtttttgtacccagag |
| | | | actatga |
| 3646 | NM_015866 | PRDM2 | ttccttatcctaatgatgcgcttttgtcccgtaaatgttaacactcatgaagcataccccggcc |
| | | | tctcag |
| 3647 | NM_016076 | PNAS-4 | atgtaaagggttctagtagaaatagtgtcctaaggccaattacctaccatactaacaatcag |
| | | | cagataaa |
| 3648 | NM_016081 | KIAA0992 | cttcccataaggagaccaaattgggtgaacacgcctcgaggagacctcaggataacagg |
| | | | tcaacacctgt |
| 3649 | NM_016187 | BIN2 | aaaagtatctatagacacagacacttgcctatacagagacataaccacacacactcagag |
| | | | gatagtgaac |
| 3650 | NM_016336 | UBE2J1 | cagcatcctttcatcaacctacccaacctgtagctaagaatacctccatgagccctcgaca |
| | | | gcgccgggc |
| 3651 | NM_016628 | WAC | accgttaagctgggcaaaggaaatgacaaggggacggggtctgtgagagtcaattcagg |
| | | | ggaaagataca |
| 3652 | NM_017530 | LOC55565 | ttagctccccggggtcattgggtcgccacctcttaatccactcggaggaccagcgatctaa |
| | | | ctgtgctgt |
| 3653 | NM_017784 | OSBPL10 | gaagctgttaaagatttatgccagagccttgcaggatggagcacctctgggacaactaag |
| | | | agccaaggcc |
| 3654 | NM_017935 | BANK1 | tgctttcagggtgaagcaagcttgaatttggattgcctgctttctttaaagcgaattcatactat |
| | | | aacag |
| 3655 | NM_017955 | CDCA4 | cctgggtgaaaatcaggaaccgcacacagccacatcttcctagacctaagagtaaattatg |
| | | | gaggatttt |
| 3656 | NM_018442 | IQWD1 | ggatactttgaacattagaaggccgctagtaaaaatggtttataaaggccatcgcaactcca |
| | | | ggacaatg |
| 3657 | NM_018842 | BAIAP2L1 | cttaagcaaatcatgcttctctgtttcacgtagttgggttgacaagtttctgcctttaagataaat |
| | | | gagt |
| 3658 | NM_020151 | STARD7 | tgaactacactgttcagataaggtcacaatctgatgctgtcagtttgaccgagctggttttgct |
| | | | tatggt |
| 3659 | NM_020199 | C5orf15 | aaaggatcccaaacttgtaactaaattctgacatatctgttactgctgactcacattcattctcc |
| | | | gccat |
| 3660 | NM_020529 | NFKBIA | acttggccccatgaacggtccatgccgataagtaaacgtcgaacaattgcccttcaaccac |
| | | | tccctctaa |
| 3661 | NM_021813 | BACH2 | accaagaatgtctataatgcatcatcacacagtacctcaggttttgcaagcacattccggga |
| | | | agataact |
| 3662 | NM_021822 | APOBEC3G | catagctgcttgtaggtgccacctcttaaggccattaccatagcaattaatactgaacatgag |
| | | | ctttgga |
| 3663 | NM_021950 | MS4A1 | gtggcacattcttagagttaccacaccccatgagggaagctctaaatagccaacacccatc |
| | | | tgttttttg |
| 3664 | NM_021966 | TCL1A | cgcctggctgcccttaaccatcgagataaaggataggttacagttacgggtgctcttgcgtc |
| | | | gggaagac |
| 3665 | NM_022552 | DNMT3A | ggaaagggtatttggtttcccagtccactatactgacgtctccaacatgagccgcttggcga |
| | | | ggcagaga |
| 3666 | NM_023037 | 13CDNA73 | cttaaacttaatgctgtcaagtgttagatgtgtgcatgtgaacttgttgcactgcagaaacata |
| | | | ttcaga |
| 3667 | NM_024708 | ASB7 | tcagtgataaaggtaccacaccgcttcagctcgccattatccgagagaggtcaagctgtgt |
| | | | gaaaatcct |
| 3668 | NM_025113 | C13orf18 | ctgtgccggctgtggaactccagtagagcctagtaagtacggataatggatcgcctgctta |
| | | | tgatgtgat |
| 3669 | NM_025216 | WNT10A | aggccacagatgtgagtaagcgagacacaacacttgtcctcttggaggttacattcttgctg |
| | | | gggggagg |
| 3670 | NM_030666 | SERPINB1 | aaactggaagagagttacactctcaactccgacctcgcccgcctaggtgtgcaggatctct |
| | | | ttaacagta |
| 3671 | NM_030764 | SPAP1 | cagacactgtgcaaataaattatttctgctaccttctcttaagcaatcagtgtgtaaagatttga |
| | | | gggaa |
| 3672 | NM_030775 | WNT5B | tcatccacgtgcacttgtgcggcatctgcagtttacaggaacggctccttccctaaaatgag |
| | | | aagtccaa |
| 3673 | NM_031305 | ARHGAP24 | taactctcccttcatatcttttcacctatttccagtccttatcatagttgataaaaacctcagact |
| | | | catc |
| 3674 | NM_031942 | CDCA7 | ccattcaatgtttgatgcataattggaccttgaatcgataagtgtaaatacagcttttgatctgt |
| | | | aatgc |
| 3675 | NM_032991 | CASP3 | gtatgacatttcacgggagatttcttgttgctcaaaaaatgagctcgcatttgtcaatgacagt |
| | | | ttcttt |
| 3676 | NM_033208 | TIGD7 | ctcctctcttcatattgtccgttttccggtattgagttagggaaagtatgcaggtattcctgtcat |
| | | | tcct |
| 3677 | NM_033274 | ADAM19 | ttccaaagtcagtaattgtgttaaccacgtgtataacagctctgctggacacccaagaaagc |
| | | | catgggaa |
| 3678 | NM_057735 | CCNE2 | cctaactggggctttcttgacatgtaggttgcttggtaataacctttttgtatatcacaatttggg |
| | | | tgaa |
| 3679 | NM_078467 | CDKN1A | cccctggaggcactgaagtgcttagtgtacttggagtattggggtctgaccccaaacacctt |
| | | | ccagctcc |
| 3680 | NM_079421 | CDKN2D | cagacgagacccaagggcagagcatttaagagtgaagtcatgacctccagggagccta |
| | | | gaagctggtggc |
| 3681 | NM_080593 | HIST1H2BK | acctcaaagctctcccgtggggcgattctcttgttgttccgatagtgtctcgcgggcgaaac |
| | | | caccagca |
| 3682 | NM_138340 | ABHD3 | ggataccaaacaattgatgattattatactgatgccagtccgagtcctagactgaagtcagt |
| | | | aggaattc |
| 3683 | NM_138379 | TIMD4 | tcataacccagcccccccggcaagttgatacttgatcatgaagtcccccaaaaataccaaa |
| | | | tacttttat |
| 3684 | NM_139207 | NAP1L1 | tgagtatgtcacttacccgtgcttctgtttactgtgtaattaaaatgggtagtactgtttacctaa |
| | | | ctac |
| 3685 | NM_139276 | STAT3 | gtaatttatataatccctgaaacgggcttcaggtcaaacccttaagacatctgaagctgcaa |
| | | | cctggcct |
| 3686 | NM_144646 | IGJ | ttaaccccagatgcctgctatcctgactaatttaagtcattgctgactgcatagctctttttcttg |
| | | | agag |
| 3687 | NM_145804 | ABTB2 | ctcctctgccctagagctgtttgttcaatcactgatgggcaaaggggagatgtagctaactg |
| | | | gtggccct |
| 3688 | NM_152785 | GCET2 | tactcttcagcagagttccctgatggccttgtacagagaacccgatgattgatgagggtata |
| | | | gcacagct |
| 3689 | NM_172373 | ELF1 | tgagccttgggctaatctggctgagtagtcagttataaaagcataattgctttatattttggatc |
| | | | atttt |
| 3690 | NM_175870 | LOC90925 | aggttgttcatggtgtatattacatggttaacatcaaaaggctgctaataggcacctcttcaat |
| | | | attaat |
| 3691 | NM_177968 | PPM1B | aatgcaggaggcagcgtgatgatacaacgtgttaatggttcattagcagtatctcgtgctct |
| | | | gggggact |
| 3692 | NM_181443 | BTBD3 | ctttatcccaccattagagagagaaatgcgatgatgttcaataatgatttgatggcagatgta |
| | | | cattttg |
| 3693 | NM_181838 | UBE2D2 | tttattgaacaagttagaggcataagcttaagagcatttccatgaaacaacacatgcagcatt |
| | | | ccaggaa |
| 3694 | NM_182746 | MCM4 | ctgaagcagtctgcaactgatccccggactggcatcgtggacatatctattcttactacggg |
| | | | gatgagtg |
| 3695 | NM_182776 | MCM7 | gagctcaatgtctggcaggtcaatgcttcccggacacggatcacttttgtctgattccagcct |
| | | | gcttgca |
| 3696 | NM_198833 | SERPINB8 | catacatggaaccatacatcatctatgctttgtagtatgactcctgtcactcagtacaattatttt |
| | | | gaga |
| 3697 | NM_201593 | CACNB2 | accgctgacatctcgcttgccaaacgctcggtattaaacaatcccagtaagcacgcaataa |
| | | | tagaaagat |
| 3698 | R99527 | MGC39372 | tgtggataaagaccccagataaagatgcctgtgttgctcaactcttgtaaatactcttgagac |
| | | | attttga |
| 3699 | T66903 | LOC54103 | atacagtggcataaacgatgctcttcctagtagcttaataggccacaagctagtttctgttgc |
| | | | actctga |
| 3700 | U37028 | ITGAD | tggacccaggtcgtctgacttctcgtgccattttcaatgaaaccaagaaccccactttgactc |
| | | | gaagaaa |
| 3701 | W56129 | SFRS9 | gtctttgtgggttgctctactatggagatcaacagttactgtgactgagtcggcccattctgttt |
| | | | agaaa |
| 3702 | X58529 | IGHM | cacccatagcatgttaaccctgccgcgtggaatccccccgggaatcgaaattccgaaccc |
| | | | aatgcagtcc |
| 3703 | AA188785 | LOC286025 | gtaacatactcatcaactatgatagacttaacacttgttacctaatgaacaaggaggatgtgc |
| | | | atttcgg |
| 3704 | AA601122 | SECTM1 | aaaatctgaaagaaacgtctttagtggctttaagccccaaaacgtccctaaggcgtcctcg |
| | | | agatgaaga |
| 3705 | AA642467 | SLC2A14 | agtgaaacctgaggattcctcgttgaagcaggtattcatccatggggttcttccgcggtgaa |
| | | | gccagctt |
| 3706 | AA682722 | LARP | gcttcacacaacacgtctaccataagtatcgtaggcgctgccttaatgagcggaaacgctt |
| | | | gggcattgg |
| 3707 | AA757235 | LOC399933 | ctaactgtttattgttggtatgtagaaatatatctgatttgcatactggtcctttatccagcaacc |
| | | | ttct |
| 3708 | AA765313 | FZD3 | tttgcatgactgatagctgtaactcacagttaacatgctttcagtcaagtacagattgtgtcca |
| | | | ctggaa |
| 3709 | AB002310 | HUWE1 | gcagagactcaccgcactgtgttaaaccagatcctacggcagtccacgacccaccttgct |
| | | | gatgggcctt |
| 3710 | AB002333 | ZNF518 | catttcagaatagccatatcaggaaaataatgtcgagatatgtacttcttgcctttaagttttaa |
| | | | cagcc |
| 3711 | AB024402 | ING1 | caggaaattactgcccacttgtcaagttcagcccaccatctgtttgaagattatatgaagttta |
| | | | aattct |
| 3712 | AB028952 | SYNPO | ttggctggtagagccttctagaggttcagaatattagcttcaggatcagctgggggtatgga |
| | | | attggctg |
| 3713 | AB032991 | NDFIP2 | tcatcctgtgtataattgtagactgtaccaagaagcaactaccttagctccactgccctttga |
| | | | gggatgg |
| 3714 | AF008915 | EVI5 | aggtatagtggatgctatttatgatccaagtttttacatcacatccattgatctgcctatcccttc |
| | | | tttt |
| 3715 | AF108138 | C15orf20 | gaacataagctgcaaaatgtgcacccatattttaagctgctttttcaggggataaatagtgttt |
| | | | ggggac |
| 3716 | AF116668 | LMO2 | agggtggggtaagggatttcttaggggatggtagacctttattgggtatcaagacatagcat |
| | | | ccaagtgg |
| 3717 | AF143327 | FLJ32810 | gtggatctattcaaagcttaacttctgtaggttccaaggagacacccaaagcttcaccaaac |
| | | | ccagacct |
| 3718 | AF200348 | D2S448 | ggatcccaccctaccacgactacagggtctactgcaatctatcggcggcacacacgttcg |
| | | | aggacctgaa |
| 3719 | AF245480 | MONDOA | tctttgtattggagatatttctgtaactcattctcttggtgctcacgattgccatggccataggg |
| | | | ccaca |
| 3720 | AI075159 | SPTA1 | gcacaactgattgatgagcggacaaagcttggagactatgccaacctaaaacaattctacc |
| | | | gagaccttg |
| 3721 | BU948323 | TCF4 | ttcatcttttgcatccaacaggcagaatatgatctgtgtccaaaagtgaacttgagtcaggaa |
| | | | tgaatca |
| 3722 | AI675029 | C7 | acagatacaaactatttctatcctgagtagtaatctcacacttcatcctatagagtcaaccacc |
| | | | acagat |
| 3723 | AI694012 | PSMA5 | ggggaaagtgagtcaatacctgttagtgttaggctattaacaatagttaggtgaaaggtaat |
| | | | gagggcat |
| 3724 | AI732248 | COL4A1 | gacctgcaattactacgcaaacgcttacagcttttggctcgccaccatagagaggagcga |
| | | | gatgttcaag |
| 3725 | AJ007509 | HNRPUL1 | tgaacttgaaaccttttattccgggcgtcttggtagtttctggtgggattcagtgggtgagag |
| | | | ggaagaa |
| 3726 | AK022224 | ACTN1 | gctgtattcatttctccaatctcatgtccattttggtgtgggagtcggggtagggggtactctt |
| | | | gtcaaa |
| 3727 | AK023928 | PSCD1 | agacagagaggcacctgggtcagtattagtctatttatcagaggtgtaaataatctatgtata |
| | | | gtttttc |
| 3728 | AK024580 | NRP1 | tacagaaaacggtgccatccctgaacacggctggccactgggtatactgctgacaaccgc |
| | | | aacaacaaaa |
| 3729 | AK025005 | MARCH1 | ttataaaccagagaaaggcagcaaatatgtctatctttttaaatattcatgataatggaccag |
| | | | gcacggt |
| 3730 | AK091853 | COL3A1 | atggagcaaaacagtctttgaatatcgaacacgcaaggctgtgagactacctattgtagata |
| | | | ttgcaccc |
| 3731 | AK126650 | CAPZB | acatagggacctacacacagaggagtgaacttagggttctagggactatggccgggtca |
| | | | ccggtggccag |
| 3732 | AK127124 | ARHGEF4 | aaagatgccggaagccccaaaaagcccaccctagtgagtctgcctctaggacccgaagt |
| | | | tctctccccag |
| 3733 | AK127132 | DRG1 | gaagcctttactagcagcttcaacccagtcctccttaccttgcacctattaacgttggttcaac |
| | | | atgaag |
| 3734 | AK129940 | GNAI1 | ctttagttttcgacattatttttaggttttaagagtggcaacttaggattttagggtgatggctttg |
| | | | gaa |
| 3735 | AL049313 | CLIC5 | ttggactggtggcatcatgtaactgctaaccttacagtaaaaacccaagaatgggtcaaaa |
| | | | atgtcttcc |
| 3736 | AL049327 | CBLB | cagagtcagcatgctaattcactctagttcaaatccacattctagttgaatccctgcaatgtaa |
| | | | cttgac |
| 3737 | AL049449 | GAB1 | gatcaggtttagacaatgagctttggttgtgttcttgttagtcctaatattggttttcagtttggaa |
| | | | tta |
| 3738 | AL050391 | CASP4 | caagaagaatcatgatgagggatgggatgaaggcagcaaggggtaaccatcttgacctt |
| | | | ctgttttttct |
| 3739 | AL137527 | LRCH3 | ccctgcggtattgttttccctctgttgtatgtatagatatatgctacttgtcaattttccaattttga |
| | | | aa |
| 3740 | AL353942 | SEPT11 | gacctgtagtggcatgagagtgtataacatttcctaagatgacaggcaaagtagaactaac |
| | | | cctggcact |
| 3741 | AL833915 | TDRD9 | ccagagagagttgcgcagcttcaagacattgcccgtcagaagcttttaggtttgttctgtca |
| | | | gtcaaaac |
| 3742 | AL834278 | USP30 | atgtgaccttaaagtgtactgcaaagctgtaactttaagtaattgctgttctgccactgcttact |
| | | | ctgaa |
| 3743 | AU252485 | MAP7 | gcggtcagtttccaccatgaatctttcgaaatatgttgatcccgtcattagcaagcggctctc |
| | | | ctcttca |
| 3744 | AV650179 | PRG1 | acagctcgtccttgggagagaaaaagctcccacagtatgtggcgtctgaggggtaacag |
| | | | cattatatttc |
| 3745 | AV686223 | KIAA1407 | tcccacctgcaactgctgaataatacactcagtttgtcttctagtactcagctcagtttgatcta |
| | | | gatat |
| 3746 | AW014009 | MAP2K3 | gagcaccttgcagacgtgatcttgcttcgtcctgcagcactgtgcggggcaggaaaatcc |
| | | | aagaggaaga |
| 3747 | AW190768 | SLC13A3 | tcattactctccacccccttactctgctataatttctccttaataggacactgtataacttattttct |
| | | | ta |
| 3748 | AW292143 | GFAP | ggttgtgggtgaccagttgcacttggcctctggattgtgggaattaaggaagtgattcatcct |
| | | | cttgaag |
| 3749 | AW439398 | CCND1 | tggctgaagtcacctcttggttacagtagcgtagcgtggccgtgtgcatgtcctttgcgcct |
| | | | gtgaccac |
| 3750 | AW452039 | HRMT1L3 | cattttcttagacgtttgctccaccagatttaaccaaatgtaactcccacattgagtttatctata |
| | | | ttga |
| 3751 | AW615076 | LOC492304 | gtccattggacctaaactacacgcagactgagcatagacagagcgcagacaatcacaaa |
| | | | gcagaaaagca |
| 3752 | AW664012 | ALOX5 | caagtgcaaagttcacacctgatttttaagacttagaataaggaggtggggaatgtgaaata |
| | | | tctcattt |
| 3753 | AW967479 | CD38 | aaggaaaaacaaataagcgagaaccgcgacgagcaccacataagccgtaggaccgca |
| | | | tgaaagaagagac |
| 3754 | AW970654 | PHTF2 | ttcaaagagaattgtggcagatgttgtgtgtgaactgttgtttctttgccacatgtgttgtatttg |
| | | | aaag |
| 3755 | BC028066 | NALP1 | accaggaaccaccttggcaagatatttacccaccggccatctctgtttactcatgaatgttaa |
| | | | atgttaa |
| 3756 | BC034289 | LOC87769 | gggagagctcacttactcttcaacttaatggcagactgtgatcgctaactgcatctggcaca |
| | | | aaaacatg |
| 3757 | BC042366 | PCDH9 | tcatcatcaccgcaactctgacgtttcctacaagaagttagagacttaagcagtattggcatc |
| | | | ggatgga |
| 3758 | BC045532 | LSM8 | gaattttacaagctggttaattgatgtcttgttagtagcttgaaattggctgtggtgggagtgtt |
| | | | tgcac |
| 3759 | BC050383 | TMPO | gacacagtatcatgaaagtcctatttcagtaagacccatttacatacagtagatttttagcag |
| | | | agatctt |
| 3760 | BC050602 | HIST1H2AC | gctggaatggtggtaagtgaactgaaaattccagtcactcttgggctagactcaacgttctt |
| | | | aaaaacta |
| 3761 | BC058855 | VEGF | gggaaaagatattaacatcacgtctttgtctctagtgcagtttttcgagatattccgtagtacat |
| | | | attta |
| 3762 | BE147267 | ECE1 | tctgggaacaccaagcaccctgaatcgagactgcaggagccctgcggggtgagactgtg |
| | | | tcagagataca |
| 3763 | BE549606 | BZW1 | tattcaaggcttaactgaaaccggtactgatttggaagcagtagctaagtttcttgatgcttct |
| | | | ggagca |
| 3764 | BE798965 | LAMC1 | gtggcatcctacttacgtacgtggcataacacatcgtgtgagcccatgtatgctggggtag |
| | | | agcaagtag |
| 3765 | BE927772 | SFRS3 | caaaattacactatccacctggtacctaagtcttgtcatggacttacaggtttgcatgggttcc |
| | | | aaatac |
| 3766 | BF055235 | RIPK1 | gggcctgggtgagttctgtttgctccttgtaccaccatccaaatggtgttatcaaatctcttag |
| | | | attcca |
| 3767 | BF513638 | WNT3 | ggggctttctttttagttctctagggtctgataggaacagacctgaggcttatctttgcacatgt |
| | | | taaag |
| 3768 | BG682263 | HDAC3 | tgtggagatttaagagtggcttgggatgctgtgtcccaaggaatttcttttcacctcttggaag |
| | | | ggctgg |
| 3769 | BG683220 | PMS2 | tacatctcaggtttcatttcacaatgcacgcatggagttggaaggagttcaacagacagaca |
| | | | gtttttct |
| 3770 | BI493513 | PHF8 | gggaggggttgggagtgttagtaatcaaggtttagaacaccatgagatagttacccctgat |
| | | | ctccagtcc |
| 3771 | BI559738 | GPR56 | actggaaccgacatgctgggagattacatcttctctatggcaagcgtgacttcttgctgagt |
| | | | gacaaagc |
| 3772 | BM709325 | BCL7A | ttccacaaagtgctggcacttacacccacaacccggaaggctgtggaccgattcctctag |
| | | | ggtggtgacc |
| 3773 | BM711190 | MED28 | caggactttgatctcttctgttgccctcgctaggttctccctggtgggttagtgctttgtatctgt |
| | | | ctct |
| 3774 | BM727177 | GOLT1B | aagcattattagacttgaaagggtttgataatctcccagtccttagtaaagattgagagaggc |
| | | | tggagca |
| 3775 | BQ009245 | GPM6B | caactatctaaaacctaattgcaaattgaccacagacctctaacctcctacttttatagacttg |
| | | | aatact |
| 3776 | BQ021469 | AGPS | aaggatttgacccaaatcagctaagtgtagccacattactgtttgagggggatcgtgagaa |
| | | | ggttcttca |
| 3777 | BQ215285 | LEF1 | gcttcttgtcacctaacaaaggcgtaggagtaacctcgcactttgctagctaacctgactcc |
| | | | gggtgagg |
| 3778 | BQ898221 | ITGA6 | agactgtagctcagtattcgggagtaccttggtggatcatcctagtggctattctcgctggga |
| | | | tcttgat |
| 3779 | BU929213 | SESN3 | tgactggactaatgtaaggcagatgacgtgatctttaagactgctatatatatcagtctcttac |
| | | | tctata |
| 3780 | BU954396 | RPL11 | cagatgtgaattctcaaaagttagccattgctgcaatctctgctgttgcctcctgttctgaaaa |
| | | | aattaa |
| 3781 | BX095432 | CNTN5 | gatgtaagccttaagccttcgcagtttccacgtggcattgagcgttcgagtgcacagaacta |
| | | | gaagtcaa |
| 3782 | BX640908 | EVI1 | cccctttccgaatttcaaggaccaaggtgacccgacctgtgtatgagagtgccaaatggtg |
| | | | tttggcttt |
| 3783 | BX648339 | USP53 | caaggaaaaggatcatataaacatgaccgagttgtacctcagagtcgagcttctgcacaaa |
| | | | taataagtt |
| 3784 | BX648365 | SEPT7 | tggcactgctaaaatagaatatagcatctttcatatggtaggaaccaacaaggaaactttcct |
| | | | ttaactc |
| 3785 | BX649193 | TKT | tcaccatcaagcccctggacagaaaactcattctcgacagcgctcgtgccaccaagggc |
| | | | aggatcctcac |
| 3786 | C05886 | ETV6 | gtacctgcctaatccacccggcgtgactcatttcaacactaagtactaggggtgttgtcagg |
| | | | agacaaat |
| 3787 | D31762 | TRAM2 | cacttacatcatagataaattttagcttcccagtaactgagggatttgtttcctaacgccattgg |
| | | | aggcc |
| 3788 | D86967 | EDEM1 | gtgctggtgaaaaggtagggctgagtgattaccttagccacagggtggctgagcaggaa |
| | | | ctttagaagaa |
| 3789 | H41942 | NPEPPS | ggaatggttaaacacaaaaggctgatagctggtatcacatagttggagtcagtgcataattc |
| | | | caagtggc |
| 3790 | M60028 | HLA-DQB1 | aagaaggctttgcggatccccggagaccttcgggtagcaactgtcaccttgatgctggcg |
| | | | atgctgagct |
| 3791 | M77810 | GATA2 | gggaggtagctaattctcctctgtagctcttgcaatcccgttgattctaacatcaggcttctga |
| | | | gagttc |
| 3792 | N26272 | MSI2 | tcctcgttttgaatataagattcccaaacagaggagcataacacattcctagtacctaagttc |
| | | | caggtgg |
| 3793 | N28431 | COL6A1 | atgccatggactttatcaacgacgccaccgacgtcaacgatgccctgggctatgtgaccc |
| | | | gcttctaccg |
| 3794 | N41620 | WWP1 | gggaagtcatctgtaactaaaggtggtccacaaattgcttatgaacgcggctttaggtgga |
| | | | agcttgctc |
| 3795 | N53163 | COL27A1 | gtcgagtttgccatcagccgggtccagatgaatttcctgcacctgctaagctccgaggtga |
| | | | cccagcaca |
| 3796 | N54946 | EWSR1 | atagacgtgtcatgtagtggggtgtaatcggtatatgaacggtagggtagatggtattagatt |
| | | | ctaattt |
| 3797 | N70000 | UBE3B | cttttgtaactggtgttcactgacaccttgatggctcttgatggctctaaaaagttgtaggatttt |
| | | | ttgt |
| 3798 | NM_000016 | ACADM | caaaatctatcagatttatgaaggtacttcacaaattcaaagacttattgtagcccgtgaaca |
| | | | cattgac |
| 3799 | NM_000024 | ADRB2 | cctacacccttggacttgaggattttgagtatctcggacctttcagctgtgaacatggactctt |
| | | | ccccca |
| 3800 | NM_000033 | ABCD1 | agcctaatttattggattccctattcgtagccatctccgtggccaatgtgactaccgtgccag |
| | | | cagcggg |
| 3801 | NM_000062 | SERPING1 | atgctctcaatcatggagaaattggaattcttcgatttttcttatgaccttaacctgtgtgggct |
| | | | gacag |
| 3802 | NM_000089 | COL1A2 | tccttgatattgcacctttggacatcggtggtgctgaccatgaattctttgtggacattggccc |
| | | | agtctg |
| 3803 | NM_000099 | CST3 | aaacacacctctgaggccagcggccagcgtctgactcacaagccatgactgccccacct |
| | | | tcttacaacaa |
| 3804 | NM_000110 | DPYD | tattgtcgactgcatcaaaatggtttccaggacaacaccttatgaaccaaagagaggcgta |
| | | | cccttatct |
| 3805 | NM_000118 | ENG | agtagccaagctgcttgtcctgggcctgcccctgtgtattcaccaccaataaatcagaccat |
| | | | gaaacctg |
| 3806 | NM_000120 | EPHX1 | ctccaggcttttcttggggaagataccccttttctgaggaatgagtttgcctccgtcccctgc |
| | | | ccatgct |
| 3807 | NM_000147 | FUCA1 | attaaaggaactgagtacattaccctgatgtctaaatggaccaaagatctgagatccattgt |
| | | | gattatat |
| 3808 | NM_000169 | GLA | tgggctgtagctatgataaaccggcaggagattggtggacctcgctcttataccatcgcag |
| | | | ttgcttccc |
| 3809 | NM_000182 | HADHA | ctgtctgtgcagatgctttgcccaggcttctcaccacggtgtaccgggatattaaacctcttt |
| | | | ccccagc |
| 3810 | NM_000194 | HPRT1 | gaaaagtaagaagcagtcaattttcacatcaaagacagcatctaagaagttttgttctgtcct |
| | | | ggaatta |
| 3811 | NM_000214 | JAG1 | gtgtcggtcttccagtctccagccggtgaagacaaagtgcacctctgactcctattaccag |
| | | | gataactgt |
| 3812 | NM_000234 | LIG1 | agtgacaagggcatctcccttcgcttccctcggtttattcgagtccgtgaagacaagcagc |
| | | | cggagcagg |
| 3813 | NM_000246 | MHC2TA | tcaattctcatttgtcacacactttggctattagagatcaaccccttcgctcctgtgtcttgcaa |
| | | | tggca |
| 3814 | NM_000249 | MLH1 | gtgccccctttggagggactgcctatcttcattcttcgactagccactgaggtgaattggga |
| | | | cgaagaaa |
| 3815 | NM_000251 | MSH2 | ttgggattcatgttgcagagcttgctaatttccctaagcatgtaatagagtgtgctaaacaga |
| | | | aagccct |
| 3816 | NM_000277 | PAH | actttgctgccacaatacctcggcccttctcagttcgctacgacccatacacccaaaggatt |
| | | | gaggtctt |
| 3817 | NM_000305 | PON2 | ctcagtgtatgatgggaagctgctcataggcactttataccacagagccttgtattgtgaact |
| | | | ctaaatt |
| 3818 | NM_000341 | SLC3A1 | ataatatgatttcgggccttcccgctaaaataagaataaggttaagtaccaattctgccgaca |
| | | | aaggcag |
| 3819 | NM_000361 | THBD | caaagctttttccagaggctattattttcactgtagaatgatttcatgctatctctgtgtgcacaa |
| | | | atat |
| 3820 | NM_000382 | ALDH3A2 | tggtctggacaagaagcgagtaagccactgcggttggtcatactgaagggaattgatggc |
| | | | aagaggatcc |
| 3821 | NM_000395 | CSF2RB | ggagtccagagcccacgtctactgcggaaaagtcaggggaaactgccaaacaaaggaa |
| | | | aatgccccaaag |
| 3822 | NM_000417 | IL2RA | caaatcaatgcgtacgtttcctgagaagtgtctaaaaacaccaaaaagggatccgtacatt |
| | | | caatgttta |
| 3823 | NM_000418 | IL4R | ctcaggtgctagggaaggcgggaaccttgggttgagtaatgctcgtctgtgtgttttagtttc |
| | | | atcacct |
| 3824 | NM_000435 | NOTCH3 | acacaggcatgactgggatcccgtgtaccgagtacacgacccaggtatgtaccaagtag |
| | | | gcacccttggg |
| 3825 | NM_000448 | RAG1 | gaggcaggatatataagcgccagtggtagttgggaggaataaaccattatttggatgcag |
| | | | gtggtttttg |
| 3826 | NM_000484 | APP | caagaagagtagaagacagagccttactttataatcagaattatgaaaagaggagccaat |
| | | | gagagggaaa |
| 3827 | NM_000485 | APRT | ggaagcagctccgggtaggtgatgggtaacattccttaaatggtgcatgtcactggcctttc |
| | | | agctggga |
| 3828 | NM_000536 | RAG2 | ttatataccttcaagcaaccctttggattatgcccatgaacaagttagtttctcatagctttaca |
| | | | gatgt |
| 3829 | NM_000546 | TP53 | ttggtagtttctacagttgggcagctggttaggtagagggagttgtcaagtcttgctggccca |
| | | | gccaaac |
| 3830 | NM_000561 | GSTM1 | tctgcccatataagaagaactgtgcggcacagcgcccgctactacagctcgtcacacggt |
| | | | gttgtccgac |
| 3831 | NM_000574 | DAF | gtcttctatctgggcacacgtgtttcacgttgacaggtttgcttgggacgctagtaaccatgg |
| | | | gcttgct |
| 3832 | NM_000578 | SLC11A1 | atcgagctagccattgtgggctccgacatgcaggaagtcatcggcacggccattgcattc |
| | | | aatctgctct |
| 3833 | NM_000594 | TNF | atatttatctgattaagttgtctaaacaatgctgatttggtgaccaactgtcactcattgctgag |
| | | | cctct |
| 3834 | NM_000598 | IGFBP3 | taggctttgtgttatgtgatggcactatttcaattggctttctaattggacaattgatactatgct |
| | | | atct |
| 3835 | NM_000601 | HGF | tatcttgtgccaaaacgaaacaattgcgagttgtaaatgggattccaacacgaacaaacat |
| | | | aggatggat |
| 3836 | NM_000604 | FGFR1 | acctctgccccagataggtggtgccagtggcttattaattccgatactagtttgctttgctgac |
| | | | caaatg |
| 3837 | NM_000610 | CD44 | accaagaattgattttgtagccaacattcattcaatactgttatatcagaggagtaggagaga |
| | | | ggaaaca |
| 3838 | NM_000628 | IL10RB | gtaattttcagccttttatatcactaaaataagatcatgttttaattgtgagaaacagggccga |
| | | | gcacag |
| 3839 | NM_000629 | IFNAR1 | aatgaagtttgctgtggtattgcatagccttgctttcttgaactaaactgtttgcccttcacaag |
| | | | tagtt |
| 3840 | NM_000640 | IL13RA2 | tgatacatgaagactttccatatcaagagacatggtattgactcaacagtttccagtcatggc |
| | | | caaatgt |
| 3841 | NM_000660 | TGFB1 | tgctggcacccagcgactcgccagagtggttatcttttgatgtcaccggagttgtgcggca |
| | | | gtggttgag |
| 3842 | NM_000700 | ANXA1 | tcagaagatgtatggtatctccctttgccaagccatcctggatgaaaccaaaggagattatg |
| | | | agaaaatc |
| 3843 | NM_000701 | ATP1A1 | gagtttggaactctaccctggtaggaaagcaccgcagcatgtggggaagcaagacgtcc |
| | | | tggaatgaagc |
| 3844 | NM_000717 | CA4 | caccacaccgacctgcgatgagaaggtcgtctggactgtgttccgggagcccattcagct |
| | | | tcacagagaa |
| 3845 | NM_000732 | CD3D | agtttcagatcctcgtaggccacaggggaaaaaggtccatttgtctcaccgggaggctca |
| | | | atattgcctg |
| 3846 | NM_000773 | CYP2E1 | agtgcagagcgcttgtacacaatggacggtatcaccgtgactgtggccgacctgttctttg |
| | | | cggggacag |
| 3847 | NM_000801 | FKBP1A | ggcgggggcaccatattgcgcacaaacacccctatcacgaaaattacaccccccaacgg |
| | | | caacttttaca |
| 3848 | NM_000852 | GSTP1 | ttgggtcggccagttcagcggatgctatggtgccggggcgacaaggtcgcaactataatc |
| | | | taaccgcctt |
| 3849 | NM_000856 | GUCY1A3 | tgactttgactcaataaaccactcaccctattattggaaagtgccataggccttgagaaagta |
| | | | tagttac |
| 3850 | NM_000867 | HTR2B | actgaagagcgagttagttatgtatagcagaactggcagttgtcatcaaacataatgatgag |
| | | | taagatga |
| 3851 | NM_000878 | IL2RB | cccctaccccgacccctccacgtatctttcctaggcagatcacgttgcaatggctcaaaca |
| | | | acattccac |
| 3852 | NM_000885 | ITGA4 | cactggcaatagtatggctcccaatgttagtgtggaaataatggtaccaaattcttttagccc |
| | | | ccaaact |
| 3853 | NM_000887 | ITGAX | cagcatcagctcagggcttcatcgtggggctctcagttccgatttcccaggctgaattggg |
| | | | agtgagatg |
| 3854 | NM_000905 | NPY | tgtgctgcactcctgcaatgttaaccttggtcagcactcggcacacccctgcgcggtgcac |
| | | | ataacagca |
| 3855 | NM_000906 | NPR1 | cttactgggaggagaaagagtcacctgaaggggaacatgaaaagagactaggtgaaga |
| | | | gagggcagggga |
| 3856 | NM_000953 | PTGDR | aaacgcagctgcaactgaagcggagactctaaacccagcttgcaggtaagagctttcacc |
| | | | tttggtaaaa |
| 3857 | NM_000960 | PTGIR | gaaggggaggctgctgcattgtgggtgatgacgtaggacatgtgcttggtacaaaaaggg |
| | | | cctgagacat |
| 3858 | NM_000964 | RARA | ggcaaatacactacgaacaacagctcagaacaacgtgtctctctggacattgacctctggg |
| | | | acaagttca |
| 3859 | NM_000967 | RPL3 | ggctcagagtgagcgctgggtacagcgcccgaatcggacagtgtagaaccattctctact |
| | | | gccttccttc |
| 3860 | NM_000968 | RPL4 | gaagggctctttggatctctgggcttttcaagattctgctaagatctgtattaatcatcttgtgc |
| | | | atggg |
| 3861 | NM_000970 | RPL6 | gggcacgaggggacatatctgtgaaccctccacggtggaaaaaatgccgcccttagtcg |
| | | | ggtggggaaaa |
| 3862 | NM_000972 | RPL7A | aaccttgaaaatctcagaaaacagtaagccaagctaactgcctctttttgtcttttcagatccg |
| | | | ccgtca |
| 3863 | NM_001001547 | CD36 | tttgatagttctgaagagcaaatgaatcctagtacattgaagagtaccgtactctatctggca |
| | | | cttaatt |
| 3864 | NM_001005 | RPS3 | atggaagagggtgtagtaatgcgtatcagaggtagcggagaatgaagagcgacaagtgg |
| | | | gacgagctgta |
| 3865 | NM_001009 | RPS5 | gaagagcgaggagcgaagaaggaagacgagacgactagaagcacacaataagacga |
| | | | caaccagacacaaa |
| 3866 | NM_001015 | RPS11 | acaatgccgggggccctcagcttggtgttggagaaaggcccatagtgtcatgttacagcat |
| | | | cctgtgggg |
| 3867 | NM_001019 | RPS15A | tgagtgttgatgtttttctgcactagaaggcactatgttgaactattaaacttaccagcactttct |
| | | | tttt |
| 3868 | NM_001069 | TUBB2 | gtgcggaggaagtaattaggttgggcgagtcggtatcggttgtgatgttggcgtatcgtatg |
| | | | tctggagg |
| 3869 | NM_001079 | ZAP70 | tcctgaagcgcgataacctcctcatagctgacattgaacttggctgcggcaactttggctca |
| | | | gtgcgcca |
| 3870 | NM_001092 | ABR | atacagccttttgggtaaacactgggaactccagaagttgtggggagagtggggaatcag |
| | | | acagccgcct |
| 3871 | NM_001130 | AES | ccacacctgtgtctgtatatagtcagcttatctcgtgttcaatcgtctgatctctacagagaga |
| | | | agtgga |
| 3872 | NM_001150 | ANPEP | gtacctgagctacaccctgaacccggacttaatccggaagcaggacgccacctctaccat |
| | | | catcagcatt |
| 3873 | NM_001165 | BIRC3 | tctagtagtatgcaaagattgtgctccttctttaagaaagtgtcctatttgtaggagtacaatca |
| | | | agggt |
| 3874 | NM_001175 | ARHGDIB | attagcaacacttagccaactatatgccacctatctgcctatgtatacttttcaatgcccaact |
| | | | attctt |
| 3875 | NM_001178 | ARNTL | ctggaagctgtaggctaatgggactggcccacagctttcctactctacttcattaccacact |
| | | | gggtttca |
| 3876 | NM_001207 | BTF3 | attgtgtgtcattgtattctttggttctgctcccccactattgaccaatgtatgagatgggaaga |
| | | | ggggg |
| 3877 | NM_001211 | BUB1B | tctggaaacttagccaaaatatttctgagctaaaagatggtgaattgtggaataaattctttgt |
| | | | gcggat |
| 3878 | NM_001219 | CALU | agggaagccgtgcttctgaggaacaactctaattagtacacttgtgtttgtagatttacacttt |
| | | | gtatta |
| 3879 | NM_001226 | CASP6 | ttcctttggatgtagtagataatcagacagagaagttggacaccaacataactgaggtggat |
| | | | gcagcctc |
| 3880 | NM_001228 | CASP8 | gcaataaataccagacacgtacaaaatccagctatgaatatagagggcttatgattcagatt |
| | | | gttatcta |
| 3881 | NM_001229 | CASP9 | ggatttttggctacacacaaaccagtatcgctcatagatcagcaaaccggggcctactaga |
| | | | gtctgaaca |
| 3882 | NM_001237 | CCNA2 | ataccctggaaagtcttaagccttgtctcatggaccttcaccagacctacctcaaagcacca |
| | | | cagcatgc |
| 3883 | NM_001239 | CCNH | accaatgtcattctgccacgtatgttccatatgtcctatctatctgccctgcacaattatgaga |
| | | | gggaag |
| 3884 | NM_001255 | CDC20 | gcaaagaggcaagcgcaagacgacaggaaacgaagcgagagacgagaagccggtg |
| | | | acgagcaggagaaag |
| 3885 | NM_001256 | CDC27 | gagccccactattacatctcccccaaacgcactgcctcgaagaagttcacgactctttacta |
| | | | gtgacagc |
| 3886 | NM_001265 | CDX2 | taacatccaagccagagtttttaaagccttctggatccatggggggagaagtgatatggtg |
| | | | aagggaagt |
| 3887 | NM_001273 | CHD4 | tgaggttacagatgtcagagcgtaacattctcagccgcctggcaaaccgggcacccgaa |
| | | | cctaccccaca |
| 3888 | NM_001274 | CHEK1 | tttcaaccttcggtgtgcttgggagtggcgattgtgatttacacgacaaaatgccgaggtgct |
| | | | cggtgga |
| 3889 | NM_001280 | CIRBP | agtccttgcccacaacgatgtggagccctgtgaaagtcggattcgaataaagggccacgt |
| | | | gtgcacccag |
| 3890 | NM_001295 | CCR1 | cattacctacacttccactacccaaagacaaaatgtgcccactgtgtgcttttgagtgtatttt |
| | | | ctttta |
| 3891 | NM_001313 | CRMP1 | gaaacctccaccagtccaacttcagcttatcaggtgcccagatagatgacaacaatccca |
| | | | ggcgcaccgg |
| 3892 | NM_001337 | CX3CR1 | gagagaataagtcatgttccttcaagatcatgtaccccaatttacttgccattactcaattgat |
| | | | aaacat |
| 3893 | NM_001344 | DAD1 | gatgaagagtggcggcagacagagcgcaggagagcgaacagaacgaccaagaagag |
| | | | ccagacgaagagca |
| 3894 | NM_001345 | DGKA | tgagcaacctgtccctagaaggcatcgcagtgctaaacatccctagcatgcatggtggctc |
| | | | caacctctg |
| 3895 | NM_001398 | ECH1 | aaggagatgatgtggcccggatcagctggtacctccgtgacatcatcactcgataccagg |
| | | | agaccttcaa |
| 3896 | NM_001404 | EEF1G | cccctaatcactgtcgcctgtaattctccaaaacccttccaccaattcatgcgctatcaaatgt |
| | | | attatt |
| 3897 | NM_001428 | ENO1 | ttctcgcctcactttccaccaagtgtctagagtcatgtgagcctcgtgtcatctccggggtgg |
| | | | ccacagg |
| 3898 | NM_001436 | FBL | gagcaagcacataaacgagggaacacatcatacaccagtccgcgaagcgctaggacca |
| | | | tacgagacagac |
| 3899 | NM_001441 | FAAH | gtagtggtgcatgtgctgaagctgcagggtgccgtgcccttcgtgcacaccaatgttccac |
| | | | agtccatgt |
| 3900 | NM_001456 | FLNA | aagaaccgcaccttctccgtctggtacgtccccgaggtgacggggactcataaggttact |
| | | | gtgctctttg |
| 3901 | NM_001459 | FLT3LG | agactgtcgctgggtccaagatgcaaggcttgctggagcgcgtgaacacggagatacac |
| | | | tttgtcaccaa |
| 3902 | NM_001462 | FPRL1 | agagtcaaatttagagcagaaaatactagcaaaggggactgaaaagcggtggccaattg |
| | | | agcttcaaatg |
| 3903 | NM_001489 | NR6A1 | tgatgattttggcccttgatggatctaaaactcggaacattactcctcaatgccgtttccccag |
| | | | ttgctc |
| 3904 | NM_001513 | GSTZ1 | ctggccttgaaaggcatcgactacgagacggtgcccatcaatctcataaaggatgggggc |
| | | | caacagtttt |
| 3905 | NM_001515 | GTF2H2 | tgaatgtaaaatctgtggtcttactttggtgtctgctccccacttggcacggtcttaccatcatt |
| | | | tgttt |
| 3906 | NM_001540 | HSPB1 | ttgtcggtcaggcgcgacaccacgctcgcaatgataccacacatcactacaactccgccc |
| | | | gacgacaaac |
| 3907 | NM_001560 | IL13RA1 | catcccctgtgggaaattagtaggctcatttactgttttaggtctagcctatgtggattttttcct |
| | | | aaca |
| 3908 | NM_001607 | ACAA1 | taagggccagccttgaaagggatactagcctgcagtgggcatctgtcaccgtgtgtgtgcc |
| | | | caagtggga |
| 3909 | NM_001630 | ANXA8 | taacaaaataaactacaaattcctgacccaaggacactgtgttataagaggcgtgggctcc |
| | | | cctggtggc |
| 3910 | NM_001640 | APEH | ccctcaagacccggaatgtgcctgttcggctcctgctctatcccaaaagcacccacgcatt |
| | | | atcagaggt |
| 3911 | NM_001654 | ARAF | gctcattgtcgaggtccttgaagatgtcccgctgaccatgcacaattttgtacggaagacctt |
| | | | cttcagc |
| 3912 | NM_001664 | RHOA | aaaggaccctggtgggccagacgggttggacatcgttaataatcatagttggcttctaaata |
| | | | ctggtagc |
| 3913 | NM_001712 | CEACAM1 | ctttctccaggaggattagcttggagttctctatactcaggtacctctttcagggttttctaacc |
| | | | ctgac |
| 3914 | NM_001715 | BLK | ccagcttgtcgcaagtaacgacacggaacagctcgaacgctcgtgactttattgcagaaa |
| | | | agccccgcag |
| 3915 | NM_001716 | BLR1 | cctcgcaagctgggtaatcgatgggggagtctgaagcagatgcaaagaggcaagaggc |
| | | | tggattttgaat |
| 3916 | NM_001728 | BSG | tggaacccggcacagtcttcactaccgtagaagaccttggctccaagatactcctcacctg |
| | | | ctccttgaa |
| 3917 | NM_001734 | C1S | actagggagggtgtgaggggcacggtgccatgtggggatgttggtgatatggccctgtgt |
| | | | gttatacctt |
| 3918 | NM_001743 | CALM2 | gttgcactattgcaaaacgggtgtattatccaggtactcgtacactatttttttgtactgctggt |
| | | | cctgt |
| 3919 | NM_001747 | CAPG | ccgacaacgaagcacgcacaaggaacgcaccagatcaaccgacagcagaacgcacg |
| | | | agagccaagaccat |
| 3920 | NM_001752 | CAT | ggcttcaaaatagagaatcccactttctatagcagattgtgtaacaattttaatgctatttcccc |
| | | | agggg |
| 3921 | NM_001753 | CAV1 | tcaccggggtggtttagtggctcaacattgtgttcccatttcagctgatcagtgggcctccaa |
| | | | ggagggg |
| 3922 | NM_001759 | CCND2 | atgatcagtgtatgcgaaaaggtttttaggaagtatggcaaaaatgttgtattggctatgatg |
| | | | gtgacat |
| 3923 | NM_001767 | CD2 | tttgactctacactcaaagccatctgatgctcacatttcatgtagtcagaggaggccatctgg |
| | | | tttgaat |
| 3924 | NM_001772 | CD33 | caaaatctggtacattcctgcaatgcatatcattcagacataaagatgggccgaagtacag |
| | | | atacatgct |
| 3925 | NM_001774 | CD37 | agctggagcgaagcttgcgggacgtcgtagagaaaaccatccaaaagtacggcaccaa |
| | | | ccccgaggagac |
| 3926 | NM_001776 | ENTPD1 | ccactgcagtttaatggatgagatgcccacttttaagccaaaaatactaagctcagactgga |
| | | | cctcctct |
| 3927 | NM_001783 | CD79A | ccagagaaacgaagtgagcagaactcgtaggaaaggctcgtgggtaaggagagtgcgc |
| | | | gcggtgactgca |
| 3928 | NM_001786 | CDC2 | ttcttatgccttggtcagagtaataactgaaggagttgcttatcttggctttcgagtctgagttt |
| | | | aaaac |
| 3929 | NM_001793 | CDH3 | aatgcctcccattcggatggatctctgcgtttttatactgagtgtgcctaggttgccccttatttt |
| | | | ttat |
| 3930 | NM_001794 | CDH4 | gcactgccaaagcttgtccgtgggagtgccacactcataactgccaggttccgacttctgt |
| | | | ccaccctag |
| 3931 | NM_001795 | CDH5 | gaccgaggttcccactctgggcaaagcccctcacactgcaagggattgtagataacactg |
| | | | acttgtttgt |
| 3932 | NM_001798 | CDK2 | cttccttttagtattcttagttgttcagttgccaaggatccctgatcccattttcctctgacgtcca |
| | | | cct |
| 3933 | NM_001830 | CLCN4 | ggaaaatattgagctaggcacattactctctgaacgaaattcatattatcttattaaggaaga |
| | | | gtgttgg |
| 3934 | NM_001838 | CCR7 | atcaaagccacactctgggctccagagtggggatgacatgcactcagctcttggctccact |
| | | | gggatggga |
| 3935 | NM_001839 | CNN3 | gtgtatctggtttctacatggaagactaaactcatgcttattgctaaatgtggtctttgccaact |
| | | | aaatt |
| 3936 | NM_001897 | CSPG4 | ttgaggccaacatgttcagcgtcatcatccccatgtgcctggtacttctgctcctggcgctca |
| | | | tcctgcc |
| 3937 | NM_001901 | CTGF | gtttttcggacagtttatttgttgagagtgtgaccaaaagttacatgtttgcacctttctagttga |
| | | | aaat |
| 3938 | NM_001905 | CTPS | gccatgaaaccagagacaaaatctctatactgccctgagttggggggaattctcagtgcca |
| | | | actgtggct |
| 3939 | NM_001908 | CTSB | gcagagaatcacgtcctggaactgcatgttcttgcgactcttgggacttcatcttaacttctc |
| | | | gctgccc |
| 3940 | NM_001916 | CYC1 | gggggccgaacttgaacctcaacacgacagccaacgtgcataagcatgcaacactaccg |
| | | | aggtagccaca |
| 3941 | NM_001923 | DDB1 | caagatgcaggaggtggtggcaaacctacagtatgacgatggcagcggtatgaagcga |
| | | | gaggccactgca |
| 3942 | NM_001928 | DF | caccgctatggacagagcgcagtagtgattagtcgtatttcgcgacacctcacacggtaga |
| | | | tgtgatcaa |
| 3943 | NM_001939 | DRP2 | aggtgcatgcgggcagtgatgggagaaggggaggcatgattcttctgaccctagaaatgt |
| | | | tccctttaat |
| 3944 | NM_001941 | DSC3 | tttgctcactcccactcaccgatcaaaacctgctacctccccaagactttactagtgccgata |
| | | | aactttc |
| 3945 | NM_001952 | E2F6 | gcagccttgctgttgagtcagtccaaggggttttacttaggacaagttgtaccttgccctctct |
| | | | ccagct |
| 3946 | NM_001964 | EGR1 | tttggcttataaacacattgaatgcgctttattgcccatgggatatgtggtgtatatccttccaa |
| | | | aaaat |
| 3947 | NM_001993 | F3 | tttgcacataacatgctttagattatatattccgcacttaaggattaaccaggtcgtccaagca |
| | | | aaaaca |
| 3948 | NM_001999 | FBN2 | cctgatcccactgctgttgaacagatcagcctagagagtgtcgacatggacagccccgtc |
| | | | aacatgaagt |
| 3949 | NM_002015 | FOXO1A | catgcctcctgcatttcgctacccgagtttagtaacagtgcagattccacgttcttgttccgat |
| | | | actctg |
| 3950 | NM_002017 | FLI1 | atgatgacatgtcgaagtctacccaatatcccccagtaagagaataaggggcaagaatga |
| | | | ctcatgaact |
| 3951 | NM_002023 | FMOD | tatagtttggctggggagcacttaattcttcccatttcaaaaggtaatgttgcctggggcttaa |
| | | | cccacc |
| 3952 | NM_002033 | FUT4 | gtaacctcttcaactggacgctctcctaccgggcggactcggacgtctttgtgccttatggc |
| | | | tacctcta |
| 3953 | NM_002046 | GAPD | acctcttttgccccccacacaaaagcccctttggtgtgaaaaacggcccccacaagtttata |
| | | | aaaggggg |
| 3954 | NM_002049 | GATA1 | tcatccggcccaagaagcgcctgattgtcagtaaacgggcaggtactcagtgcaccaact |
| | | | gccagacgac |
| 3955 | NM_002064 | GLRX | aacatctgataaaacttacagccccctacaccaagagtgtatctgtgaaagagctcctaca |
| | | | ctttgaaaa |
| 3956 | NM_002065 | GLUL | gccatgtacagtatgttcaaagtcaaataactcctcattgtaaacaaactgtgtaactgccca |
| | | | aagcagc |
| 3957 | NM_002068 | GNA15 | atggaatctgcagccgctccatggcctcgatcatggcccgcatggacacgaagatgttct |
| | | | ggtagaccag |
| 3958 | NM_002076 | GNS | atctcagtcatttgacttagaaagtgcccttcaaaaggaccctgttcactgctgcacttttcaa |
| | | | tgaatt |
| 3959 | NM_002086 | GRB2 | ctgcttctcttttcctcgcagatgataaaaggaatctggcattctacacctggaccatttgatt |
| | | | gtttta |
| 3960 | NM_002090 | CXCL3 | gaccttacattcacactttggatgttcttgaggtgaattccctgcagtgtctgcaagcactgg |
| | | | cagcgca |
| 3961 | NM_002094 | GSPT1 | atcagctaagctcccttggcgatctgcaggaacactagtaatgactggaattactccgtgat |
| | | | ctttgatg |
| 3962 | NM_002102 | GYPE | agtttcacaacatcctgtaacattggcttacctgtatattatatgccacccgtaaccataaaaa |
| | | | caccag |
| 3963 | NM_002107 | H3F3A | aggaggcaaaaccaaaagtttatgtggtgcttggggtggaccggtcggcggatgtcgtgc |
| | | | gttaattaaa |
| 3964 | NM_002108 | HAL | ctgagaggtgtcggatgctcttggctttaaggatcaatgtcttagccaaaggatacagtggc |
| | | | atttccct |
| 3965 | NM_002110 | HCK | caccaggaatcagggaggcaggctctgaggacatcatcgtggttgccctgtatgattacg |
| | | | aggccattca |
| 3966 | NM_002118 | HLA-DMB | aattattgtccaaggctatatttctgggatgaatataatctgaggaagggagttaaagaccct |
| | | | cctgggg |
| 3967 | NM_002121 | HLA-DPB1 | ggagcaagaaagttcaacgaggatctgcataaacagggttcctgacctcaccgaaaaga |
| | | | ctaatgtgcct |
| 3968 | NM_002128 | HMGB1 | gtcaaatttcctaactttgctgtgcaaaggttgagagctattgctgattagttaccacagttctg |
| | | | atgat |
| 3969 | NM_002129 | HMGB2 | aaaatgcaggttgtagctttttgatgggctactcatacagttagattttacagcttctgatgttg |
| | | | aatgt |
| 3970 | NM_002135 | NR4A1 | aggtttggcacccacttctccacaccttgagggctcggggatactggatacacccgtgacc |
| | | | tcaaccaag |
| 3971 | NM_002141 | HOXA4 | cttgcatttatttaagacactgttacagagatactgttgtcaccttctggggcacggtctttgg |
| | | | ggagag |
| 3972 | NM_002145 | HOXB2 | aaaatattgggcactcggttatcttttaaaattcacacagaaaaattccgtttggtagactcctt |
| | | | ccaat |
| 3973 | NM_002162 | ICAM3 | atttgcctcgtgagctggacgcttggcactgataagtaccattatgtgttacgttgacgaaga |
| | | | acgggat |
| 3974 | NM_002166 | ID2 | tacatcttggacctgcagatcgccctggactcgcatcccactattgtcagcctgcatcacca |
| | | | gagacccg |
| 3975 | NM_002167 | ID3 | aaggtcttttcagagcgtggaggtgtggaaggagtggctgctctccaaactatgccaagg |
| | | | cggcggcaga |
| 3976 | NM_002186 | IL9R | cagatgtgggcggcctgtgtgaacctgtcgtgcaaagctcacgtcaccaactgctgcagtt |
| | | | atctcctga |
| 3977 | NM_002193 | INHBB | cctctagatgtccaagtgccacgtgaactatgcaatttaaagggttgacccacactagacg |
| | | | aaactggac |
| 3978 | NM_002198 | IRF1 | agtggcagccaacaaacgtggatgggaaggggtacctactcaatgaacctggagtccag |
| | | | cccacctctgt |
| 3979 | NM_002199 | IRF2 | ttgcggttactctttaggccttgtctgtaaaacgaatggctcaggctaagtgatctctaaatgc |
| | | | ctaaat |
| 3980 | NM_002222 | ITPR1 | acccccgtgaaatatgcccgcctctggtcggagattccctcggagatcgccattgacgact |
| | | | atgatagta |
| 3981 | NM_002224 | ITPR3 | agttgtacgcccaggcaacaagggctgagctgcgcttgcgtggctgtttcatgaccgcttg |
| | | | tttttctcc |
| 3982 | NM_002228 | JUN | ttcaaagccgggtagcgcgcgcgagtcgacaagtaagagtgcgggaggcatcttaatta |
| | | | accctgcgctc |
| 3983 | NM_002229 | JUNB | actaaaatggaacagcccttctaccacgacgactcatacacagctacgggatacggccg |
| | | | ggcccctggtg |
| 3984 | NM_002230 | JUP | atagtagttaccttgcagggtcgttgtcaggttatgtgagaaaaaataagcagggcattgaa |
| | | | ttcactgc |
| 3985 | NM_002248 | KCNN1 | gtgggaatcagaaaaacctgttcccatcaccggcctagcctagaatcctagcctagaagc |
| | | | cctctctccc |
| 3986 | NM_002276 | KRT19 | aggggatgcgaaggacggggaccttaaccccgggtcttctcctgagctgccgaataaac |
| | | | ttttggtccca |
| 3987 | NM_002312 | LIG4 | ctagtgaggaaagcctctgatctggcagactcattgcagcaggtggtaatgataaaatact |
| | | | aaactacat |
| 3988 | NM_002341 | LTB | ccacatgaatggtagatgtaggcagcatgagtggttaagagtcaagggagtagccgggg |
| | | | tagtggcttac |
| 3989 | NM_002349 | LY75 | aacattttcccaagtgtgggaacattatttttagattgagtaggtaccttgtagcagtgtgcttt |
| | | | gcatt |
| 3990 | NM_002351 | SH2D1A | aagtacatgataagcgaggttccccgtgtgtaggtagatctggtctttagaggcagatagat |
| | | | aggtcagt |
| 3991 | NM_002353 | TACSTD2 | agaggagaggcgacagtcgcgagccacactttgcaatgaaactctttagactttctgccg |
| | | | ggagagcggc |
| 3992 | NM_002356 | MARCKS | ttaaactcaaccaagctgtgataagtggaatggttactgtttatactgtggtatgtttttgattac |
| | | | agca |
| 3993 | NM_002379 | MATN1 | agcgagccgcaggacgaacacgtcgattacgtggagagctacagcgtcatcgagaagc |
| | | | tgtccaggaagt |
| 3994 | NM_002388 | MCM3 | aggagtcggccacctacattgcagaagagtattcacgcctgcgcagccaggatagcatg |
| | | | agctcagacac |
| 3995 | NM_002390 | ADAM11 | ctaggttatgggtacggcaaccacatgtcccagatcgtctccaattcgaaaacaaccgtcc |
| | | | tgctgtccc |
| 3996 | NM_002392 | MDM2 | aaatgcacttcatgcaatgaaatgaatcccccccttccatcacattgcaacagatgttgggc |
| | | | ccttcgtg |
| 3997 | NM_002393 | MDM4 | acagaagtaatctgattagtcaaattattaagtgccatggattactttatgcagcagtcaggta |
| | | | catagt |
| 3998 | NM_002398 | MEIS1 | agtctatgttttagagctgcttaaaacaggaagtgatgtataaggtggtggttgttgcatggg |
| | | | gacaatg |
| 3999 | NM_002412 | MGMT | ggcgtggaggcaccgctgtattaaaggaagtggcagtgtcctgggaacaagcgtgtctg |
| | | | ccctttctgtt |
| 4000 | NM_002414 | CD99 | gggtgttctggtcgccgccccggatggtggtttcgatttatccgatgcccttcctgacaatga |
| | | | aaacaag |
| 4001 | NM_002415 | MIF | tctgtgcctctgcgcgggtctcctggtccttctgccatcatgccgatgttcatcgtaaacacc |
| | | | aacgtgc |
| 4002 | NM_002417 | MKI67 | tgcttccttctacgtaggccaacctcaaaactttcagtaggaatgttgctatgatcaagttgtt |
| | | | ctaaca |
| 4003 | NM_002419 | MAP3K11 | aggaaggctggaagcgcgagatccagggtctcttcgacgagctgcgagccaaggaaaa |
| | | | ggaactactgag |
| 4004 | NM_002421 | MMP1 | gaacacatgtgcagtcactggtgtcaccctggataggcaagggataactcttctaacacaa |
| | | | aataagtgt |
| 4005 | NM_002422 | MMP3 | tttatgttattacagggcattcaaatgggctgctgcttagcttgcaccttgtcacatagagtga |
| | | | tctttc |
| 4006 | NM_002436 | MPP1 | ttggagaaagcgtttttaactgcaactttctataatgccaaaatgacacatctgtgcaataga |
| | | | atgatgt |
| 4007 | NM_002441 | MSH5 | cttggtgagaattttctaacagatttacactcagagcctggtcgccccccgttagcccagatt |
| | | | caaaagg |
| 4008 | NM_002444 | MSN | aggctgagtagaagatcctaccccaattccttgtaggagtataggccggtctaaagtgagc |
| | | | tctatgggc |
| 4009 | NM_002447 | MST1R | agcacctcgcatgagatgaatgtgcgtccagaacagccgcagttctcacccatgccagg |
| | | | gaatgtacgcc |
| 4010 | NM_002460 | IRF4 | tgtaagttatgttttacatgccccgtttttgagactgatctcgatgcaggtggatctccttgaga |
| | | | tcctg |
| 4011 | NM_002462 | MX1 | tctctgcttatccgttagccgtggtgatttagcaggaagctgtgagagcagtttggtttctagc |
| | | | atgaag |
| 4012 | NM_002466 | MYBL2 | tgtctctgaccaactcccagttctctacagagcacgggaaagcccctcggggacgtctttc |
| | | | ctgcagtgt |
| 4013 | NM_002475 | MLC1SA | gtttccgcgtacgaacacctaaggatctactaaccgttcgcattctacttaacgcaggtcctt |
| | | | tctcttg |
| 4014 | NM_002483 | CEACAM6 | acacaggagattccagtctacttgagttagcataatacagaagtcccctctactttaactttta |
| | | | caaaaa |
| 4015 | NM_002512 | NME2 | taggtgatcacacacaccagccctgaacacgtgcggacaacgacacgcttcgcgcgctg |
| | | | ttggatgtaac |
| 4016 | NM_002514 | NOV | tggcatctgcacggcggtagagggagataactgtgtgttcgatggggtcatctaccgcagt |
| | | | ggagagaaa |
| 4017 | NM_002527 | NTF3 | ctctcaggagtcactctgtaaaatctgtgtacaccagtattttgcattcagtattgtcaaggcc |
| | | | atgact |
| 4018 | NM_002530 | NTRK3 | acggataactttatcttgtttgacgaagtgagtcccacacctcctatcactgtgacccacaaa |
| | | | ccagaag |
| 4019 | NM_002572 | PAFAH1B2 | gctacttgaactgtcaggggcatctgcctaaaccagaatcttttgtcagaaaccttaaccca |
| | | | acaaaaca |
| 4020 | NM_002576 | PAK1 | catgtcagccccattgactaccttctcatgctctgaggtactactgcctctgcagcacaaatt |
| | | | tctattt |
| 4021 | NM_002585 | PBX1 | tagaattttagaggcatagaagagagatcctaggtctagagactacaatccaaatagacta |
| | | | agttgggaa |
| 4022 | NM_002592 | PCNA | tcagacgtgtgaacggcacaccgacaatcacatggacaccccccaagaagtgatacgag |
| | | | ccaagccccca |
| 4023 | NM_002600 | PDE4B | agaaaggagcagtggtgtcgttcaccgtgagagtctgcatagaactcagcagtgtgccct |
| | | | gctgtgtctt |
| 4024 | NM_002608 | PDGFB | tggagtgataatattgtttccctcgtccgtctgtctcgatgcctgattcggacggccaatggt |
| | | | gcttccc |
| 4025 | NM_002609 | PDGFRB | agttggtccaaggagggagagtgggttctcaatacggtaccaaagatataatcacctaggt |
| | | | ttacaaata |
| 4026 | NM_002616 | PER1 | atctccaggagtccatgagaggctttcttctcctatgtcccaattctcagaactcagatgtgg |
| | | | ctagacc |
| 4027 | NM_002621 | PFC | agggtatatatttcggaggtaaaagaaagtagctcatgccaacaagtaacattcaccagca |
| | | | tttattgag |
| 4028 | NM_002648 | PIM1 | ctgttttcttcatcatgagttctgctgaatgccgcgatgggtcaggtaggggggaaacaggt |
| | | | tgggatgg |
| 4029 | NM_002658 | PLAU | attaggaagtgtaacagctgaggtctcttgagggagcttagccaatgtgggagcagcggtt |
| | | | tggggagca |
| 4030 | NM_002659 | PLAUR | ctgctaatgactgccagactgtggggaggcactctcctctggacctaaacctgaaatcccc |
| | | | ctctctgcc |
| 4031 | NM_002687 | PNN | caaaggataagaattcccggtccgacagaaagaggtctatatcagagagtagtcgatcag |
| | | | gcaaaagatc |
| 4032 | NM_002704 | PPBP | aacttctttaactcaccaggaagggtagaattttgaaacctgattttctatacgttctcatttatt |
| | | | cagg |
| 4033 | NM_002729 | HHEX | ttaaggggatagtacctcccaattcaagcagagaaactgacctgactaaagttaatcgcag |
| | | | atgaactag |
| 4034 | NM_002730 | PRKACA | acagggtctgccggggaagtttcaacattagccaggcggtgatgttcaccttgggatacca |
| | | | tggggccga |
| 4035 | NM_002744 | PRKCZ | gaaaaacgcccacgtcagggtgaccatctgtggtaaccgagaattccttggaggcagcgt |
| | | | cttcaccgcc |
| 4036 | NM_002753 | MAPK10 | ggtccatttcatgtgatctattactctgacataaacccatctgtaatatattgccagtatataag |
| | | | ctgtt |
| 4037 | NM_002758 | MAP2K6 | gctttcctttgagattggatagcaaaccatataagtagtattccttatcatggctgagaacata |
| | | | agaaga |
| 4038 | NM_002791 | PSMA6 | gatgtcaccctgtgctctcgtcacagactaacctgtcgtaggttaacagatcgcgagcaca |
| | | | cacgtgctg |
| 4039 | NM_002800 | PSMB9 | ataatatcaggcagttaccatacgagaaatcaaggtcgttgggacggaagtaaccttatct |
| | | | gcttttccc |
| 4040 | NM_002814 | PSMD10 | ttgtgataggagggatatttacatattttagtggaccacattttaagttggatggtgtgctctaa |
| | | | aatac |
| 4041 | NM_002827 | PTPN1 | aaaggcacaagatcacatttccagttaccctattacattgatatatacggccatgaaaagta |
| | | | gatggatt |
| 4042 | NM_002831 | PTPN6 | tgaccaactgcggggagcatgacacaaccgaatacaaactccgtaccttacaggtctccc |
| | | | cgctggacaa |
| 4043 | NM_002835 | PTPN12 | tagctgataaaatctctaagccacaggaattaagttcagatctaaatgtcggtgatacttccc |
| | | | agaattc |
| 4044 | NM_002844 | PTPRK | tttgtaattgactaaagcattccagtgtcctctttctagattgccagctcatgacatggtgcttat |
| | | | aaag |
| 4045 | NM_002856 | PVRL2 | ggtgtcacggtcacctgcaaagtggagcatgagagcttcgaggaaccagccctgatacct |
| | | | gtgaccctct |
| 4046 | NM_002868 | RAB5B | tcttcaaaggcccagtttcccctcacgcagcctcttaggtagcgtttcccctaatcgtgggg |
| | | | gttggacc |
| 4047 | NM_002870 | RAB13 | cttcaccccttatagttggctcgagagcatggaatccgatttttcgaaactagtgctaaatcc |
| | | | agtatga |
| 4048 | NM_002880 | RAF1 | ctttctccagaggcagaacacatgttttcagagaagctgctgctaaggaccttctagactgc |
| | | | tcacaggg |
| 4049 | NM_002887 | RARS | ggatgatggcagaaagattgtatttgtcccagggtgttccataccattaaccatagtaaaatc |
| | | | agatgga |
| 4050 | NM_002893 | RBBP7 | agagtatgttacatggcatataacggattgattaccttagatgtttgcacctaactgtatatga |
| | | | gcaaat |
| 4051 | NM_002901 | RCN1 | cttttcgactttatactctgagttattacttactgtaagtggtgtatatgaaacctccatgcatttt |
| | | | cca |
| 4052 | NM_002908 | REL | ggcagtatgcaaaatgagcaattgagtgactcctttccatatgaattttttcaagtataacttg |
| | | | caagat |
| 4053 | NM_002913 | RFC1 | cagaccagtaggaaccaggctgggtcaggctcttaatttcactatggtgggggacaaaat |
| | | | gaacactggc |
| 4054 | NM_002934 | RNASE2 | acccaaatatgacctgtcctagtaacaaaactcgcaaaaattgtcaccacagtggaagcca |
| | | | ggtgccttt |
| 4055 | NM_002935 | RNASE3 | agaggggcctgtgggttgagacactatagagtgtgtcataaccgagaccggatagggga |
| | | | gtagttacttc |
| 4056 | NM_002936 | RNASEH1 | aaaatggtggtattctcattctgtcgttttgcttgcctttattagctggaatggttttctaagaaa |
| | | | gtgt |
| 4057 | NM_002953 | RPS6KA1 | gagcatctggctgtttagcagaactcattctatccccaatcagctccttttccgttctgttctgc |
| | | | tggga |
| 4058 | NM_002960 | S100A3 | cgtccgaaacacccgaactggtcaactctcaagagaccatctggttcaggttcctgactgg |
| | | | gccagcgag |
| 4059 | NM_002961 | S100A4 | ctgtatacgatcgcatacaatcatgtctcacagcgctgatcttagcacattatgtcatgtttcc |
| | | | atctca |
| 4060 | NM_002971 | SATB1 | ggaagaggaccccaagactgcatcccagtctttgctggtaaaccttcgggctatgcagaat |
| | | | ttcttgcag |
| 4061 | NM_002972 | SBF1 | atgtggaccggctgagcaagaggacgcctgtgttccacaattacatgtatgcgcccgagg |
| | | | acgcagaggt |
| 4062 | NM_002975 | CLEC11A | cgaacgggtgtgctgatctcgtggacatgcttccgctccagctgttagcgacttgagctcgt |
| | | | cttcacag |
| 4063 | NM_002983 | CCL3 | tccaagcccggtgtcatgtaagtgccagtcttcctgctcacctctatggaggtagggaggg |
| | | | tcagggttg |
| 4064 | NM_002984 | CCL4 | tcgaattcataatatcgatggagcgggggagggagataataaaagaatagaagggttcctt |
| | | | cccccccac |
| 4065 | NM_002985 | CCL5 | ctgcatcaacacttcagattctacattaccactcaaacgcgaaacacaatcaaaatacccg |
| | | | agagaccgc |
| 4066 | NM_003002 | SDHD | ccggataaacaggtgtctaacgggcaatcgcctagaaacgatagagacagaacgcatgc |
| | | | gcgcaggcggg |
| 4067 | NM_003005 | SELP | ccttgccaacctgtgaggctatttcgtgtgagccgctggagagtcctgtccacggaagcat |
| | | | ggattgctc |
| 4068 | NM_003009 | SEPW1 | cgtttgcaagcgtatcacggatgtcacatcacactactcggatgacaatttcaacccgcaa |
| | | | aagaacaac |
| 4069 | NM_003025 | SH3GL1 | ccgaaagtcctggaccggtggctagcaatatcgtgtgttgcgcactcgtaaagtgtgttattt |
| | | | caaccct |
| 4070 | NM_003038 | SLC1A4 | agtccacagagtcggtagaccaggggttacgtgactggggaaaatctcacatctccttgtc |
| | | | tgaaaacat |
| 4071 | NM_003039 | SLC2A5 | tctgaaggacacggggacgttctcaccagcacatggtattaccggcctcgtcggtgtggtc |
| | | | tgtctgatg |
| 4072 | NM_003058 | SLC22A2 | caggaatacaacttaagtaatcatgaggtccttccatatttagattgggtaagcatgaatgtg |
| | | | tattttc |
| 4073 | NM_003072 | SMARCA4 | tggatgcatgtgcgtcaccgtccactcctcctactgtattttattggacaggtcagactcgcc |
| | | | gggggcc |
| 4074 | NM_003073 | SMARCB1 | acatgatcacggatacacgactctagccaccagtgtgaccctgttaaaagcctcggaagt |
| | | | ggaagagatt |
| 4075 | NM_003100 | SNX2 | tttatctagagctttgtctcagcttgcagaggttgaggagaagatagaccagttacatcaag |
| | | | aacaagct |
| 4076 | NM_003113 | SP100 | ccactaatctgtgactgctcctgtggaaactccacatcacaattctccaaaatttatcattgcc |
| | | | atttta |
| 4077 | NM_003118 | SPARC | cataatcctgcaagtactaggcgtggatatctggataatgaaggagtgtgaattaagaagg |
| | | | agtaccagg |
| 4078 | NM_003121 | SPIB | ccacaaagactgagttctcatggggatcctacccttcctagtgccactccctatggccatgc |
| | | | tgaagacc |
| 4079 | NM_003123 | SPN | ctcttcttgacgcttttcataatgtgcaaagtcatcaaagattgaggtggtatgcttgaaagta |
| | | | gcaatt |
| 4080 | NM_003127 | SPTAN1 | agcacgccaacgccttccaccagtggatccaagagaccaggacatacctcctcgatggg |
| | | | tcctgtatggt |
| 4081 | NM_003128 | SPTBN1 | tgaactgggacaggactatgagcatgtcacgatgttacaagaacgattccgggagtttgcc |
| | | | cgagacacc |
| 4082 | NM_003133 | SRP9 | caaggtgttaggtgtgactgtcacaactgttatgttttccagtaaactagaagtacgatatttg |
| | | | ataatt |
| 4083 | NM_003159 | CDKL5 | ctttcagctgcccaacccagcaatccgggttctctttcttcgtgagacacgttatgagggaa |
| | | | gccctgat |
| 4084 | NM_003189 | TAL1 | agcatttgggtaatttagattgtaaaccgctttggcctgagttattgagattgtcctcatttctcc |
| | | | agat |
| 4085 | NM_003200 | TCF3 | accctctttcaggtggattcagagacctgtcctgtatataacagcactgtagcaataaacgt |
| | | | gacatttt |
| 4086 | NM_003222 | TFAP2C | cttggaagattctatttaattgaaactctctgttcagaaagcaataactttgtctcgttcctgttg |
| | | | ggct |
| 4087 | NM_003225 | TFF1 | aaagagatcgatattataccaacctgtgcggcccaccgcgaagtcgtactccgactcggc |
| | | | cgccccaatc |
| 4088 | NM_003234 | TFRC | catcttcaaagcttgaagatcgttagtatctaacatgtatcccaactcctataattccctatcttt |
| | | | tagt |
| 4089 | NM_003262 | TLOC1 | tgaatcccttagaggtctgtgaattgtaggttaagaacccctgccctagctaatcagatcca |
| | | | ccaatgtt |
| 4090 | NM_003288 | TPD52L2 | cacttggagttgttttggttgcaggtgacagaaagcacgactcaaggtagcatcaaccaaa |
| | | | cagggaggt |
| 4091 | NM_003302 | TRIP6 | tctcagttccagttcccatcctttgattgatcactctccctgacatccacctgtatgactttgtca |
| | | | ccaa |
| 4092 | NM_003311 | PHLDA2 | ccttgattaatctttcaccgccccagcgcagacctgggaagcggaaaatcccgccgtatttt |
| | | | cccagccc |
| 4093 | NM_003315 | DNAJC7 | aaggcagttcagtttttcgtacaggctctcaggatggctcctgaccacgagaaggcctgca |
| | | | ttgcctgca |
| 4094 | NM_003318 | TTK | tgcatcttcaaatcactggcagattccggagttagcccgaaaagttaatacagagcagaaa |
| | | | cataccact |
| 4095 | NM_003352 | SUMO1 | actacgatactacaaacacaccacacaacccaactcaaaccacatcaatgcaatacatca |
| | | | acaaaatcac |
| 4096 | NM_003361 | UMOD | atgctgctttttctcaaaatgggacttgtgacggtgtacctgaggcccccatctccttaaaga |
| | | | gtgtggc |
| 4097 | NM_003383 | VLDLR | aaactaattttggtacgtatgaatgatatctttgacctcaatggaggtttgcaaagactgagtg |
| | | | ttcaaa |
| 4098 | NM_003390 | WEE1 | ctgtagtccggccctactcccacgtatccaacctagtctaccctagaatccactaacgcttta |
| | | | ttatgtt |
| 4099 | NM_003395 | WNT9A | agaccaaaaatgtctgctagctagttggtttctatacaaatacatattcgaatgtcttgctgga |
| | | | tgaaga |
| 4100 | NM_003403 | YY1 | gtctggtcagagttgctgagtgggttgatctctggtctttccttgacagtgcacgttcgaagg |
| | | | ctgtggg |
| 4101 | NM_003415 | ZNF268 | tgtatcggaagcatataccttggagggaccatgctatgagggaaagtgtaaatctagaaat |
| | | | gagaaaccc |
| 4102 | NM_003425 | ZNF45 | tgcagatctcgtggacaagtgtttatcaaactgaaggttgcagcttgttagtgggttcagaaa |
| | | | tcagttt |
| 4103 | NM_003427 | ZNF76 | gtatgccagcaaggttcttcatgacagccagattccccgtaatggaaaagggcagcaagtt |
| | | | ggagacaga |
| 4104 | NM_003453 | ZNF198 | accagatggttgtgtatgggtagcactactaaaagtttagaacttgcagtgtctttcggaattt |
| | | | ttaaaa |
| 4105 | NM_003467 | CXCR4 | actgtagaaaagggaactgaacattccagagcgtgtagtgaatcacgtaaagctagaaat |
| | | | gatccccagc |
| 4106 | NM_003480 | MFAP5 | ttaagaatatcttcacgaacttgaccctcctactccacattgcaacatttccatcagacagcat |
| | | | ttcaat |
| 4107 | NM_003549 | HYAL3 | ctacaggaggagagccactgtggtctgaagagatgctactgcctggagactggggtctta |
| | | | acctccagcc |
| 4108 | NM_003582 | DYRK3 | ggattccctctgaaaccctagatcggggtatatgttaagggattacgaaaatctaggactttt |
| | | | tgtgggg |
| 4109 | NM_003627 | SLC43A1 | ttctcagaccaagggacctggatgacaggcaatcaaggcctgagcaaccaaaaggagtg |
| | | | ccccatatggc |
| 4110 | NM_003636 | KCNAB2 | aagtccagtctgtgccggggaaggcactggttaggaaggatgttcaaacggtcccaccc |
| | | | aagcctgtcac |
| 4111 | NM_003645 | SLC27A2 | actgcttcggtatttatgcaactcaccacagaaaccaaatgaccgtgatcataaagtgaga |
| | | | ctggcactg |
| 4112 | NM_003692 | TMEFF1 | aagacagactttagtattctctatgtagtgccaagtaggcaaaagctcactcatgttcttattg |
| | | | cagcaa |
| 4113 | NM_003701 | TNFSF11 | ttggccaccaggtgcctttcaaatttagaaactaattgactttagaaagctgacattgccaaa |
| | | | aaggata |
| 4114 | NM_003707 | RUVBL1 | aagttatcgtaactgttcctgtggttgctttgaaagaacccttccttacctggtgtgttttctata |
| | | | aatc |
| 4115 | NM_003739 | AKR1C3 | aacagtcggtcttctatttcacacaagacttctcccgccgtattggttgcggaccttgcgcgg |
| | | | ccggagg |
| 4116 | NM_003746 | DNCL1 | cacaaagcgaggagtgacgcgataaaacgccgaacggaacacgaactgcgacactga |
| | | | aagaacccacccg |
| 4117 | NM_003753 | EIF3S7 | gagatgatattgaccttattgtccgttgtgagcacgatggcgtcatgactggagccaacgg |
| | | | ggaagtgtc |
| 4118 | NM_003801 | GPAA1 | aaagttacactgaggctccccccaccgatgctgcatacagatggtgtcgggcaccaacgt |
| | | | gtacggcatc |
| 4119 | NM_003805 | CRADD | gcctcttctaccttctaactccttgctttctaagccccaggtatctgataacttgattttgtcctg |
| | | | agtc |
| 4120 | NM_003821 | RIPK2 | ccatttttaacctcagccttccctactgtcaccaacaaccaagctaaataaagtcaacagcct |
| | | | gatgtgt |
| 4121 | NM_003824 | FADD | gtcgaaaacgcgctcttgtcgatttcctgtagtgaatcaggcaccggagtgcaggttcggg |
| | | | ggtggaatc |
| 4122 | NM_003842 | TNFRSF10B | ccagtcagtaggaaagtgccacaattgtcacatgaccggtactggaagaaactctcccatc |
| | | | caacatcac |
| 4123 | NM_003852 | TIF1 | ccaaacggtgcaacagaagggtaggttagatgctattaagaaggcacttaatagtacatca |
| | | | tgtaagatg |
| 4124 | NM_003874 | CD84 | ccatagactcatctagcaccaactaccattagcactatgttaggagctgcaaggccccaaa |
| | | | gtagaagat |
| 4125 | NM_003877 | SOCS2 | atgggaaacccacgggtacagaggactgaccatattaaagagttagggctactaacctca |
| | | | aaaagtttct |
| 4126 | NM_003879 | CFLAR | tcagggctccccctgcatcacatcaggaggatgttcatgggagattcatgcccttatctagc |
| | | | agggaagc |
| 4127 | NM_003884 | PCAF | acattagtatatgcgtccagggtcataaccccctaaaatccatcatgcaaccttattaatctgt |
| | | | cttggg |
| 4128 | NM_003900 | SQSTM1 | catcatcgaagtcttccccagttataaagaggtcacatagtcgtgtgggtcgaggattctgt |
| | | | gcctccag |
| 4129 | NM_003902 | FUBP1 | tcctccagcacctcagggccaataataagaagtggacaatacagtatttgcttcattgtgtg |
| | | | ggggaaaa |
| 4130 | NM_003914 | CCNA1 | gtaccttgatataccccatcgacctcagcaagcaattagggagaagtacaaggcttcaaag |
| | | | tacctgtgt |
| 4131 | NM_003954 | MAP3K14 | cttggtactgcagagtctgggttgtagagaactctttgtaagcaataaagtttggggtgatga |
| | | | caaatgt |
| 4132 | NM_003955 | SOCS3 | ttggggtgacctgaagggaaccatcctggtaccccacatcctctcctccgggacagtcac |
| | | | cgaaaacaca |
| 4133 | NM_003974 | DOK2 | tgtacgactggccctacaggtttctgcggcgctttgggcgggacaaggtaaccttttcctttg |
| | | | aggcagg |
| 4134 | NM_003998 | NFKB1 | tgtcattgctgttgtccctctgctacgttcctattgtcattaaaggtatcacggtcgccacctgg |
| | | | cattc |
| 4135 | NM_004039 | ANXA2 | caaagagaacgacgtcacgtccacaacccaaagcctcatgcgataccaggcgacatcat |
| | | | ctgtttatttc |
| 4136 | NM_004047 | ATP6V0B | gtgtgtccatcctggttagtcatatatctcttgtggtctgtccatccaaccatgtgctagatgtc |
| | | | atctt |
| 4137 | NM_004064 | CDKN1B | aagactgatccgtcggacagccagacggggttagcggagcaatgcgcaggaataagga |
| | | | agcgacctgcaa |
| 4138 | NM_004067 | CHN2 | actgcagaggatcgctgagtggggtactgtgtctcatagacatgcgccacctccacgtga |
| | | | gaacaagggt |
| 4139 | NM_004077 | CS | cccagtcccagaaccacactgttgagttggacacactgtaaacccctgggtaactgtcaag |
| | | | tcatgatgg |
| 4140 | NM_004083 | DDIT3 | gaccagggaagtagaggcgactcgccgagctctgattgaccgaatggtgaatctgcacc |
| | | | aagcatgaaca |
| 4141 | NM_004088 | DNTT | ggaagctcatcaaagcccactttgttcgcagtgtagctgaaatactgtctatctctaataaaa |
| | | | acaggag |
| 4142 | NM_004093 | EFNB2 | actcctcctcggaagagcccgtcgcgctggacagcttacctagtcttgtagcattcggcctt |
| | | | ggtgaaca |
| 4143 | NM_004099 | STOM | gcgggtgacatttgtaacatttcctctttgagactctgagttcacctagagaagtctaagcat |
| | | | aacagct |
| 4144 | NM_004104 | FASN | actttgtggtcttctcctctgtgagctgcgggcgtggcaatgcgggacagagcaactacgg |
| | | | ctttgccaa |
| 4145 | NM_004111 | FEN1 | gtaatttgtgtctagttattcagaggagtaagatggtgatgttcacctggcaatcagctgagtt |
| | | | gagact |
| 4146 | NM_004119 | FLT3 | catatctgagagcgttccagagccgatcgtggaatgggtgctttgcgattcacaggggga |
| | | | aagctgtaaa |
| 4147 | NM_004177 | STX3A | cccagtggtaaatcccttagatcccctgctggtctctggcagtctccttgattttgggtaccat |
| | | | gtatat |
| 4148 | NM_004208 | PDCD8 | caaagtggtcgtggggattgtgctatggaacatctttaaccgaatgccaatagcaaggaag |
| | | | atcattaag |
| 4149 | NM_004221 | NK4 | gatcccgcaaccgaggagcctaggggagagctttagtgacaaggtcatgagatggttcc |
| | | | aggccatgctg |
| 4150 | NM_004235 | KLF4 | gccaaagttttcaaactgctgcatactttgacaaggaaaatctatatttgtcttccgatcaaca |
| | | | tttatg |
| 4151 | NM_004310 | RHOH | aggaattgtcgaaaccgtggaaatctatttagctgaaatctagccagtgtgtagacaatgtt |
| | | | gaaatttt |
| 4152 | NM_004313 | ARRB2 | atcatcagagagatgatccgtctcctggatcagggtttaaacatcccagagaaaggggaa |
| | | | gttgctgact |
| 4153 | NM_004320 | ATP2A1 | gggcctcatgtcaactacagccagctgactcacttcatgcagtgcaccgaggacaacacc |
| | | | cactttgagg |
| 4154 | NM_004336 | BUB1 | agttctattctgcccacttattccagaatggcagtgtattagtaggagagctctacagctatg |
| | | | gaacatt |
| 4155 | NM_004343 | CALR | caccaacgatgaggcatacgctgaggagtttggcaacgagacgtggggcgtaacaaag |
| | | | gcagcagagaaa |
| 4156 | NM_004355 | CD74 | accatggagaccatagactggaaggtctttgagagctggatgcaccattggctcctgtttg |
| | | | aaatgagca |
| 4157 | NM_004374 | COX6C | gtgtggtatgcccaaaatggaaaagaggctattcagagtggtcagggagcttagaggagc |
| | | | gtaaaggaga |
| 4158 | NM_004380 | CREBBP | gaatgcacgtccaagaatacggctctgattgcccccctccaaacacgaggcgtgtgtaca |
| | | | tttcttatct |
| 4159 | NM_004385 | CSPG2 | tgagcatgacttccgttggactgatggcagcacactgcaatacgagaattggagacccaa |
| | | | ccagccagac |
| 4160 | NM_004413 | DPEP1 | atggtgaacttctacaacaattacatttcctgcaccaacaaggccaacctgtcccaagtggc |
| | | | cggtaggt |
| 4161 | NM_004425 | ECM1 | atacccttgacaaatactgtgaccgggagtatgctgtgaagacccaccaccacttgtgttgc |
| | | | cgccaccc |
| 4162 | NM_004430 | EGR3 | taaggtacttggttatccagtgcagtgcaccggaataaagagaatttgtaggcgtatacagc |
| | | | tttaaatg |
| 4163 | NM_004448 | ERBB2 | tggccatcaaagtgttgagggaaaacacatcccccaaagccaacaaagaaatcttagac |
| | | | gaagcatacgt |
| 4164 | NM_004449 | ERG | gaacgagcgcagagttatcgtgccagcagatcctacgctatggagtacagaccatgtgcg |
| | | | gcagtggctg |
| 4165 | NM_004454 | ETV5 | tgtgaagaggttcgcagggataaggggtgcactttatagctatggaaacatgagattctcct |
| | | | ctattgga |
| 4166 | NM_004475 | FLOT2 | tagagattatgacgttgcagccccgctgcgaggacgtagagacggccgagggggtagct |
| | | | ttaactgtgac |
| 4167 | NM_004494 | HDGF | tctctgaagccacaaataggatgcttgggaagactcctagctgtcctttttcctctccacaca |
| | | | gtgctca |
| 4168 | NM_004501 | HNRPU | tttgctgggtagtggagggggtaagctaaatcatagtttctgacaataactgggaaggtttttt |
| | | | cttaaa |
| 4169 | NM_004508 | IDI1 | tgctgtgcattgcaggatggtgagcagcgtccctctcatgtgacacccacagttatgccgg |
| | | | atgttgcca |
| 4170 | NM_004513 | IL16 | tggtgggggtgcagatgaggttgctagagaatgttagaggatccctctctggattggagat |
| | | | agggaaaga |
| 4171 | NM_004526 | MCM2 | cagttctgaggccctatgccatccataaggattccttgggattctggtttggggtggtcagtg |
| | | | ccctctg |
| 4172 | NM_004530 | MMP2 | cagcccacatagtgatggttcccctgttcactctacttagcatgtccctaccgagtctcttctc |
| | | | cactgg |
| 4173 | NM_004557 | NOTCH4 | aagaattgcaggcatatgggatgtaagatgttctttcctatatatggtttccaaagggtgccc |
| | | | ctatgat |
| 4174 | NM_004583 | RAB5C | taaggtggacgttttgaccgagtcgatgcgccgttcttgtgcctgtctacctgcgcgtttgct |
| | | | gtacgcg |
| 4175 | NM_004615 | TM4SF2 | tttaatgtagtactctgcttctgtatccccgaggtgagtcagaaaaatttcaagttgccacgcc |
| | | | ttggcc |
| 4176 | NM_004624 | VIPR1 | tacccacacctctgccagaagatcccctcaggactgcaacaggcttgtgcaacaataaat |
| | | | gttggcttgg |
| 4177 | NM_004633 | IL1R2 | atttcccccctcaagaccatatcagcttctctggggtcaagactgacaatcccgtgtaaggt |
| | | | gtttctgg |
| 4178 | NM_004642 | CDK2AP1 | ccgaacactttcatactaagactgtaagtagatctcagttctgcgtttattgtaagttgataaaa |
| | | | acatc |
| 4179 | NM_004688 | NMI | ttctctaaaagcacctacatcattgcttctacgcttgacgtggctctgagctcccaatctcctg |
| | | | ggacag |
| 4180 | NM_004689 | MTA1 | tgtcagtgagagatgttggaatatatggtccaatgaagcacatccctcgcgcccgacccgc |
| | | | cctggcagt |
| 4181 | NM_004706 | ARHGEF1 | acagactgtgtcggagcggaaaaactggtgtgctctcatcactgagactgccggatccct |
| | | | gaaagtccct |
| 4182 | NM_004725 | BUB3 | aacaaaaagcgactgtgccaattccatcggtaccccacgagcatcgcatcacttgccttca |
| | | | gtaatgatg |
| 4183 | NM_004815 | PARG1 | aagtccttaagttccaactctatttttgatccggattacatcaaggagttggtgaatgatatca |
| | | | ggaagt |
| 4184 | NM_004827 | ABCG2 | catctttaaaatgaataggtaggttagtagcccttcagtcttaatactttatgatgctatggtttg |
| | | | ccat |
| 4185 | NM_004867 | ITM2A | tttatttaccaactttgcaataacagaaagtccttccgccttcgtcgcagagacctcttgctgg |
| | | | gtttca |
| 4186 | NM_004924 | ACTN4 | tctcctgctctcataatgaagacatagccgattctctgcccgggccccttgctgatgctcctc |
| | | | cgggtct |
| 4187 | NM_004936 | CDKN2B | ggttcccttctctcaatgtttgtaataattgctcataagcaataccagcaattcataaaaactg |
| | | | cttact |
| 4188 | NM_004938 | DAPK1 | ttggtgcatagcagatggtttccacatttagatcctggtttcataacttcctgtacttgaagtct |
| | | | aaaag |
| 4189 | NM_004941 | DHX8 | ttcctgtggcaagtccacagtccgagtgcagaaggccatctgcagtgggttcttccgtaat |
| | | | gctgccaag |
| 4190 | NM_004972 | JAK2 | catcttgtgtgatgttttacacacatgagggctggtgttcattaatactgttttctaatttttccat |
| | | | agt |
| 4191 | NM_004994 | MMP9 | gagtgagttgaaccaggtggaccaagtgggctacgtgacctatgacatcctgcagtgccc |
| | | | tgaggactag |
| 4192 | NM_004997 | MYBPH | aatctgccaaggtgcccacagcagagcctcccggagaagtggcagtatcagagtccacc |
| | | | agagaagagca |
| 4193 | NM_005012 | ROR1 | aggagtagggccattgctagcccgtctctcactttggtgaaatttagaaaaaggcggttcct |
| | | | tttagaaa |
| 4194 | NM_005080 | XBP1 | ccagctgattagtgtctaaggaatgatccaatactgttgcccttttccttgactattacactgcc |
| | | | tggag |
| 4195 | NM_005084 | PLA2G7 | ctcaaattaaagggagacatagattcaaatgcagctattgatcttagcaacaaagcttcatta |
| | | | gcattct |
| 4196 | NM_005085 | NUP214 | aattgcccaaggaacgctcgagtctgcttgctgtgtccaacaaatatggtctggtcttcgct |
| | | | ggtggagc |
| 4197 | NM_005098 | MSC | agaggtctagacgtgagatccgcgtcgggacagggttttaagtgacaaagaagggcgag |
| | | | tggcttctctg |
| 4198 | NM_005104 | BRD2 | tacctgaggccatagctgccctattcacttctaagggccctgttttgagattgtttgttctaattt |
| | | | attt |
| 4199 | NM_005123 | NR1H4 | gggtctgcggttgaagctatgttccttcgttcagctgagattttcaataagaaacttccgtctg |
| | | | ggcatt |
| 4200 | NM_005157 | ABL1 | tgatagaaatggtttcctctggatcgttttatgcggttcttacagcacatcacctctttcccccc |
| | | | gacgg |
| 4201 | NM_005161 | AGTRL1 | gatgtctacactgccagagagaccgtgaggatgaaattaatagtggggcctttgtgagcta |
| | | | gaggctggg |
| 4202 | NM_005178 | BCL3 | aggaggggagaggtgggccgtaacgggcacggatcacgatgtaaattattaagcattttg |
| | | | gttggatttc |
| 4203 | NM_005187 | CBFA2T3 | gtgaatgtatatagtctttgcagaggtccaaatgatattcatgatggtaataaacgagatgttt |
| | | | gccaaa |
| 4204 | NM_005192 | CDKN3 | tttttatataccacgccacccatggggggtcttaacacgtgggggggcacccgataagca |
| | | | gctttcggta |
| 4205 | NM_005197 | CHES1 | cctgaagcccgatgacatcttacgaggtggacgttggactgttcatgcgcatcgggtgtca |
| | | | gtgactcat |
| 4206 | NM_005215 | DCC | acaatcagtggtgataggcttactcatcaaatcatggatctcaaccttgatactatgtattactt |
| | | | tcgaa |
| 4207 | NM_005225 | E2F1 | cgtggactcttcggagaactttcagatctcccttaagagcaaacaaggcccgatcgatgttt |
| | | | tcctgtgc |
| 4208 | NM_005230 | ELK3 | tctttaatgttgccaaacgctgccagtatttcatccgcctcacccttctcatctcggtccccgt |
| | | | ccctgt |
| 4209 | NM_005239 | ETS2 | atggggttcagcctaacagttatggaaactacagtccttataaaccattggcatggtaataa |
| | | | acagatct |
| 4210 | NM_005245 | FAT | catccactactcaattatagatggcaaccaaggaagctcgttcacaattgaccccgtcagg |
| | | | ggagaagtc |
| 4211 | NM_005246 | FER | ttcagaaagagctcactatcatcaagagaaaactcacatagtgacaggatggcgccaaac |
| | | | tcagccttca |
| 4212 | NM_005248 | FGR | gctcatcaccaagggccgaatcccctacccaggcatgaataaacgggaagtgttggaac |
| | | | aggtggagcag |
| 4213 | NM_005252 | FOS | tgtaatgttactgatcatgcattgttgaggtggtctgaatgttctgacattaacagttttccatga |
| | | | aaac |
| 4214 | NM_005263 | GFI1 | agagtgagaaccaagtgactccctaggcttcggacacaaataggctcctctacacctgaa |
| | | | gacaaaggca |
| 4215 | NM_005318 | H1F0 | cttttcttttcctctggatttttgttcctcctgtacaagaggtgtctttgcttggtttggtggggctg |
| | | | cg |
| 4216 | NM_005334 | HCFC1 | caccgttcactattgtagagtaacccctgtgactcaatattaccatagtgcgatgtcgttttgt |
| | | | gctatt |
| 4217 | NM_005335 | HCLS1 | tgctctgtagtatcctgtgtccataccagcctgtttctacattaaacacctatactcagcctga |
| | | | agcccc |
| 4218 | NM_005339 | HIP2 | tttcttcagtgtctacatattatgtcacacgttctatttgcactgctgcaatatagatcaaagatc |
| | | | ttgt |
| 4219 | NM_005340 | HINT1 | tgtgctgctgatctgggcctgaataagggttatcgaatggtggtgaatgaaggttcagatgg |
| | | | tggacagt |
| 4220 | NM_005356 | LCK | cccacatgtgacacatatgcaccttgtgtctgtacacgtgtcctgtagttgcgtggactctgc |
| | | | acatgtc |
| 4221 | NM_005375 | MYB | tgatgcaagatggccagcactgaacttttgagatatgacggtgtacttactgccttgtagca |
| | | | aaataaag |
| 4222 | NM_005385 | NKTR | aggagtactgtctcatctcatcatattcacgggttctggagattagctcattgaaagtgggag |
| | | | gggcatt |
| 4223 | NM_005424 | TIE1 | aagccaggaaggcctatgtgaacatgtcgctgtttgagaacttcacttacgcgggcattgat |
| | | | gccacagc |
| 4224 | NM_005427 | TP73 | ggattggggtgtccaaactgcatcgagtatttcacctcccaagggttacagagcatttacca |
| | | | cctgcaga |
| 4225 | NM_005439 | MLF2 | accctttgctattcaccgtcagcatatgagccgaatgctgtccggtggctttggatatagccc |
| | | | cttcctc |
| 4226 | NM_005494 | DNAJB6 | ccccacgggagcattgtagcacgcgctgtatggttgtgcgttgtagcgtgcgctgtatagtt |
| | | | gtgatgcc |
| 4227 | NM_005504 | BCAT1 | atgtttcctggggtgacttaacaaggaataatcccacaatatacctagctacctaatacatgg |
| | | | agctggg |
| 4228 | NM_005521 | TLX1 | cctgttgagtgacagtgtttcgcagctgagcccttaaggagattctcagttgggcagagac |
| | | | atcccttcc |
| 4229 | NM_005529 | HSPG2 | cctcggatgctggggtctacatttgcacctgccgtaatctccaccaatccaataccagccg |
| | | | ggcagagct |
| 4230 | NM_005533 | IFI35 | tcctatacctctatctgtcgtgcttaaacctctgctgctcgcgtactcgtcaccgtgcgcatca |
| | | | gtgagc |
| 4231 | NM_005556 | KRT7 | cccatctcccggccaaagctggtgccactgtctcagacccccttgtgagatctccagcaca |
| | | | gaatgttct |
| 4232 | NM_005563 | STMN1 | gtattttatgatagggataattcaggtcctaattttggtgttatttaaagggaccttattttctgcc |
| | | | cct |
| 4233 | NM_005572 | LMNA | gatcaagcgccagaatggagatgatcccttgctgacttaccggttcccaccaaagttcacc |
| | | | ctgaaggct |
| 4234 | NM_005583 | LYL1 | agtgacaaatcattccacacgataccccttgcattccagtagcgaaggttgttaccgccctc |
| | | | ctaccctt |
| 4235 | NM_005589 | ALDH6A1 | tagggaactgcctagtgtaacaatgaaaccagatttctcacttgctcttcatacttctattttga |
| | | | ggtaa |
| 4236 | NM_005608 | PTPRCAP | tccatttttaatcccgccaacgcacaatctccggaggaatgcccacgagctctcgcgttggt |
| | | | ggcgttta |
| 4237 | NM_005621 | S100A12 | gagcatctggagggaattgtcaatatcttccaccaatactcagttcggaaggggcattttga |
| | | | caccctct |
| 4238 | NM_005651 | TDO2 | ccacgatgctctgatttaattctagaaacaatttgattacctcttgtttgtgacaagactaagca |
| | | | ttaag |
| 4239 | NM_005654 | NR2F1 | aggagggccgagacaggagcagcccacccagcagaaatacaatccgagctacaaagc |
| | | | atgggaaaaagag |
| 4240 | NM_005671 | D8S2298E | taaaaacttggaagaagcttcaaagctcttggaggctttaaagttctttctgttgggtgtgcat |
| | | | tacagt |
| 4241 | NM_005687 | FARSLB | tgtgtgggtagagaccatcctttccctgcatattaggccagcttgtgccatataccagtgtgg |
| | | | tgtctgt |
| 4242 | NM_005730 | CTDSP2 | attcccacttgccccagagaagctactcggccaaacctagccagggtctgttcttgtggac |
| | | | cagagccag |
| 4243 | NM_005731 | ARPC2 | attaaagagggtgtacgggagtttcttggtaaatccagaatcaggatacaatgtctctttgct |
| | | | atatgac |
| 4244 | NM_005738 | ARL4A | attgaccagctaggctatttagtcccatagtagttcagatctgcttagatgtgacaggcattg |
| | | | aaggctg |
| 4245 | NM_005761 | PLXNC1 | tgtagtaacatgcagccgaaactcatgctgagacgcacggagtccgtcgtcgaaaaactc |
| | | | ctcacaaact |
| 4246 | NM_005767 | P2RY5 | actgtgatcggaggaagtgcacccgccgtttttgttcagtctacccactctcagggtaacaa |
| | | | tgcctcag |
| 4247 | NM_005781 | TNK2 | actttgggctgatgcgagcactacctcagaatgacgaccattacgtcatgcaggaacatcg |
| | | | caaggtgcc |
| 4248 | NM_005794 | DHRS2 | ttgtgagtatgccttaaattctatggggacaaggtaagaggacaagcaaatgaaagctcag |
| | | | agagacaaa |
| 4249 | NM_005808 | CTDSPL | gaattgaccagcggctgttacactgttctttgccactgtgcctatgctcagaatatgctcact |
| | | | gctaagc |
| 4250 | NM_005809 | PRDX2 | taatagaaaaagtcgaacacgctacagctaacttcttccgttatgagagcttgagactgcgc |
| | | | cgccgctc |
| 4251 | NM_005826 | HNRPR | aggccggacccatttgggatctacgtcttatgatgaatccactgtccggtcagaatagagg |
| | | | gtatgcatt |
| 4252 | NM_005835 | SLC17A2 | gtagccatatgttacagatctcagcaccgatcagaactgtaaagctataatccccagaatta |
| | | | aagttttt |
| 4253 | NM_005845 | ABCC4 | ccacactaaggaatcgtaccttctcagagtcttcggtttggtctcaacaatcttctagaccct |
| | | | ccttgaa |
| 4254 | NM_005870 | SAP18 | ttatgtagtagtatgatacctgtacttaagcatcactcaagggtaagtgttctaggaaggttga |
| | | | tttagc |
| 4255 | NM_005895 | GOLGA3 | ggcgtgttcatccccacaccgtgtgtcacaacaggctagggcacttcacgatgtcactactt |
| | | | gtttttct |
| 4256 | NM_005900 | SMAD1 | tcctgctattctgaaattgcctacatgtttcaataccagttatatggagtgcttgaatttaataag |
| | | | cagt |
| 4257 | NM_005902 | SMAD3 | gggctttgaggctgtctaccagttgacccgaatgtgcaccatccgcatgagcttcgtcaaa |
| | | | ggctgggga |
| 4258 | NM_005907 | MAN1A1 | gctgttcaggctatcgagactcatttgatccgcaagtctagcagcggactaacttatatcgc |
| | | | agagtgga |
| 4259 | NM_005911 | MAT2A | ctggtgcttatgctcttaattgccacctctaacagcaccaaatcaaaatctctccactttcagc |
| | | | tgtctt |
| 4260 | NM_005923 | MAP3K5 | attatacactattggatgttctctactatgttacacgtgatgacttaaaatgcttgagactaagg |
| | | | ggagg |
| 4261 | NM_005933 | MLL | cacccttttctcgccgcaagaagcccattcctatggaagtctagcaaagcaatacgactca |
| | | | gcccagcac |
| 4262 | NM_005936 | MLLT4 | gagaagataaagcttaccaacttgagcggcatcgaatagaggcagctatggaccgaaag |
| | | | tctgatagtga |
| 4263 | NM_005944 | CD200 | ggaggcaaatatgagcatacaatccctttgttctaaagatattgttccagctagtggaatgat |
| | | | gttgaat |
| 4264 | NM_005954 | MT3 | gcagaattccgtttttcaccggggcgtggctaccctgtcgtgacgcgtttccgcgtattgtcc |
| | | | cctataa |
| 4265 | NM_005956 | MTHFD1 | ttctgcccattcgcgacatccgcgccagcgttggggctggttttctgtaccccttagtagga |
| | | | acgatgag |
| 4266 | NM_005957 | MTHFR | gtgaaaacatcaccaatgcccctgaactgcagccgaatgctgtcacttggggcatcttccc |
| | | | tgggcgaga |
| 4267 | NM_005965 | MYLK | gcgttattgatgggcattaatctatgttagttggcaccttaagatactagtgcagctagatttc |
| | | | atttag |
| 4268 | NM_006005 | WFS1 | cctttctgagtgacatgggtgtgccaggctagactaggaggttccggtgtctggaaaagca |
| | | | ctttacaga |
| 4269 | NM_006017 | PROM1 | tacagcatattcttcacgcagagattttcatctattatactttatcaaagattggccatgttccac |
| | | | ttgg |
| 4270 | NM_006038 | SPATA2 | tctaaccaaccgtgatgccacgtaacttaccctatggacaaaagcaggaatgactaacac |
| | | | atcctaggag |
| 4271 | NM_006060 | ZNFN1A1 | ggtgtgtggagattctaatcccaacaagcaagggtctccttcaagattaatgctatcaatcat |
| | | | taaggtc |
| 4272 | NM_006079 | CITED2 | gcagatattactgcacaaactgccatctcgcttcatttttttaactatgcatttgagtacagact |
| | | | aattt |
| 4273 | NM_006082 | K-ALPHA-1 | tccacttgacagtcatcaatagattggtttaaattgtgatcttttttccttcccgcagcgtgagt |
| | | | gcatc |
| 4274 | NM_006084 | ISGF3G | ctttgtgataattctcagtagttgtccgtgataatcgtgtcctgaaaatcctcgcacacactgg |
| | | | ctggtg |
| 4275 | NM_006098 | GNB2L1 | ccaccacttacaagctggctgttgaaatgagagcggtttcttacagtctacccggcgttgtg |
| | | | gcacatgc |
| 4276 | NM_006101 | KNTC2 | ggagcagattgctaaagttgatagagaatatgaagaatgcatgtcagaagatctctcggaa |
| | | | aatattaaa |
| 4277 | NM_006113 | VAV3 | tgttatggagggagcagcctcacacaagcagaaacactcctgtggatggtattgtagcatg |
| | | | tattgttta |
| 4278 | NM_006120 | HLA-DMA | cacctgagctataccaacagtctcctaaattatttgctagacacatggctatttggatttaaatt |
| | | | aatac |
| 4279 | NM_006152 | LRMP | gccgctcccacacagcaagaggactcatggacgtctctagaacatatcttgtggccattta |
| | | | ccagactcc |
| 4280 | NM_006184 | NUCB1 | tcaagaccttcccctaccttttgtggaaccagtgatgcctcaaagacagtgtcccctccaca |
| | | | gctgggtg |
| 4281 | NM_006185 | NUMA1 | aaacaaagagctgcgagctgaagctgaacggctgggccatgagctacagcaggctggg |
| | | | ctgaagaccaag |
| 4282 | NM_006187 | OAS3 | tgggacatgcatgctatggggaccctcttgttggacacctaattggatgcctcttcatgaga |
| | | | ggcctcct |
| 4283 | NM_006190 | ORC2L | ggaacaatacgtcatatatttggaacagttattgtctgtgccatgaccttcatgataccagtga |
| | | | gaagcc |
| 4284 | NM_006191 | PA2G4 | aatcaggagtcaaaattcatcgtcttcaagcccctctttctagccttttctactactctctgcttg |
| | | | gtca |
| 4285 | NM_006196 | PCBP1 | ttgggcaagtttggatgcatctactcaaaccacccatgaactcaccattccaaataacttaat |
| | | | tggctgc |
| 4286 | NM_006209 | ENPP2 | cagaaatcctgacactcaagacatacctgcatacatatgagagcgagatttaactttctgag |
| | | | catctgca |
| 4287 | NM_006216 | SERPINE2 | tttaaaaaactcctgtcttgctagacaaggttgctgttgtgcagtgtgcctgtcactactggtc |
| | | | tgtact |
| 4288 | NM_006230 | POLD2 | tggcacattttcagcgttggctgagttacatgtacagtgcttaggccacctgggggagagta |
| | | | agagtggg |
| 4289 | NM_006231 | POLE | actgtcaggcgccctacgactcctctgccatcgagatgacgctggtggaagttctacagaa |
| | | | gaagctgat |
| 4290 | NM_006235 | POU2AF1 | aggtttgtaggagactgagttgttagcaggtgtgcttagctcttgatagtgaacgtgtacctt |
| | | | gggaact |
| 4291 | NM_006255 | PRKCH | aaactcacaacctaaagcccaatcttgaaaatatgttgtgcaccaagacgactgcttcagct |
| | | | tcttctct |
| 4292 | NM_006263 | PSME1 | acacaacccgcgttgtgaataattggttgtttgggccggtgaatacaccggccacgcaaca |
| | | | agtttacca |
| 4293 | NM_006268 | DPF2 | gaaaggagcaacacactgcccctaggcgtgcgtgtggcccagtttctctctgctctccatt |
| | | | aagtgcatt |
| 4294 | NM_006286 | TFDP2 | catgtaatattcttagaattgagattgctacacggagcagtccttgacgatcgtgtttctgacg |
| | | | tttctc |
| 4295 | NM_006299 | ZNF193 | ctgtagcaaggttctactgttttcagtttcatattacccctatatgcatcaaagctgcaacttcc |
| | | | cttgc |
| 4296 | NM_006301 | MAP3K12 | ctgcccaagccctgtcttaaggcccagggggaggttaggagactgatagcatgtgatggc |
| | | | tcaggctgaa |
| 4297 | NM_006302 | GCS1 | cttggtggaattggctacttctacggacaagggctggtattgccagacatcggggtggaag |
| | | | ggtctgagc |
| 4298 | NM_006325 | RAN | agccacaaacccaagcgaggaccaggacacaccacagccgatgtcgacacaaaactc |
| | | | agacgcaaagcaa |
| 4299 | NM_006329 | FBLN5 | tagtttgctttttgcgtacacagagaaggctatgtaaacaaaccacagcaggatcgaaggg |
| | | | tttttagag |
| 4300 | NM_006343 | MERTK | aaactcttagaaagtttgcctgacgttcggaaccaagcagacgttatttacgtcaatacaca |
| | | | gttgctgg |
| 4301 | NM_006355 | TRIM38 | agcggcagtcctggaggctaccagacttactgagttctacctgagaaacagccaagcaaa |
| | | | gtgtgagaga |
| 4302 | NM_006362 | NXF1 | ggtccccgagtacgatacaacccctataccacccgacctaaccgtcggggtgatacttgg |
| | | | catgatcgag |
| 4303 | NM_006427 | SIVA | ggtcgtgttgccttagggcccccatgtcagtgccgtcatctagactgattatgcccgcagtg |
| | | | atcctgtc |
| 4304 | NM_006472 | TXNIP | gcactttgttcactgtcctgtgtcagagcactgagctccacccttttctgagagttattacagc |
| | | | cagaaa |
| 4305 | NM_006495 | EVI2B | ctgagataatacaatcatttccaccgcttgactcacttaacttgcccctgccaccagtagattt |
| | | | tatgaa |
| 4306 | NM_006509 | RELB | tgaacagctctgacccccatggcatcgagagcaaacggcggaagaaaaagccggccat |
| | | | cctggaccactt |
| 4307 | NM_006534 | NCOA3 | caagggattagaccacctatggctggatgcaacagttcggtaggcggcatgagtatgtcg |
| | | | ccaaaccaag |
| 4308 | NM_006559 | KHDRBS1 | ttttgtccatttgagattctgcactccatgaaaagttcacttggacgctggggccaaaagctg |
| | | | ttgattt |
| 4309 | NM_006565 | CTCF | gtgtattgcttttaagagagccatcagttagctatcagactctaggttgatgcattttgtactta |
| | | | gctgt |
| 4310 | NM_006579 | EBP | gacgtggacaacttgtgtacctaagtgaccgccccacctgtggcttatacgtggcgtggcc |
| | | | tctttcttc |
| 4311 | NM_006591 | POLD3 | accttcaagtgacttccattatggctggacaggcggtgagctcagtggattgcagtggtgtg |
| | | | ctggtgat |
| 4312 | NM_006602 | TCFL5 | tctgcggaccgggtgaccgtgcttctgtggaatgggtgaatatacttctgcggaccaggtg |
| | | | actatgctt |
| 4313 | NM_006676 | USP20 | aagactctggactcattgctgattggaacaccaggaggaggttggatttctgccagtgggg |
| | | | gatgtttct |
| 4314 | NM_006739 | MCM5 | caccatcttgtcgcgcttcgacatgatcttcatcgtcaaggatgagcacaatgaggagagg |
| | | | gatgtgatg |
| 4315 | NM_006747 | SIPA1 | cgatggtttgcccactatgacgtgcaaagcctgctctttgattgggctccgaggtctcaggg |
| | | | gatgggga |
| 4316 | NM_006748 | SLA | gcagatgggtgccctgaatggaactactttaactaatccatagggacttctggtatgctttcc |
| | | | tctcttt |
| 4317 | NM_006759 | UGP2 | gagaatgaaaaacgaggaattggagatatgaatatcgaaaactcaagagttttgccttaaa |
| | | | gagaaaca |
| 4318 | NM_006762 | LAPTM5 | cacaactgggtcaacgctttaggctgagtcactcctcgggtctctccataattcagcccaac |
| | | | aatgcttg |
| 4319 | NM_006769 | LMO4 | tgcagcgcttgcggacagtcgattcctgcgagtgaactcgtcatgagggcgcaaggcaat |
| | | | gtgtatcatc |
| 4320 | NM_006803 | AP3M2 | aagtgtttaccgccacaagatcttttttgtggccgtgatccagacggaggtcccccctctgtt |
| | | | tgtcatt |
| 4321 | NM_006820 | IFI44L | tttgagtcttctctataagtctagtgttcatggaggtagcattgaagatatggttgaaagatgc |
| | | | agccgt |
| 4322 | NM_006825 | CKAP4 | aaggggagtccttgggttctttcaaaaaattcgtgaggagagctgtctacagtggaatagg |
| | | | gggtctccc |
| 4323 | NM_006845 | KIF2C | cctgtttcccggtctcgctatcaagatccaacgcagtaatggtttaattcacagtgccaatgt |
| | | | aaggact |
| 4324 | NM_006857 | RY1 | gcagtacatgaatcgaaaaggtggattcaacagacctttggatttcattgcatgagaattga |
| | | | agtgttga |
| 4325 | NM_006875 | PIM2 | tcccaagtgctcttattctggtgagaagaaccttacttccataatttgggaaggaatggaaga |
| | | | tggacac |
| 4326 | NM_006904 | PRKDC | tggagactggcggcgtgatcgggatcgactttgggcatgcgtttggatccgctacacagtt |
| | | | tctgccagt |
| 4327 | NM_006910 | RBBP6 | tggatatcatcgatctaggtcaaggtcacccccttacagacgctatcattcacgatcaagat |
| | | | ctcctcaa |
| 4328 | NM_006931 | SLC2A3 | tggaatcacccctagatctttcttgaagacttgaattagattacagcgatggggacacagaa |
| | | | ggtcaccc |
| 4329 | NM_006932 | SMTN | agagcacggactttgaagagcggaagctcatccgggctgcacttcgtgagctccgacaa |
| | | | aggaagagaga |
| 4330 | NM_006937 | SUMO2 | ccatgttaatatgcaagtatactagcagaaaaattgggccatagtatcgtggatttccaggta |
| | | | ttttctg |
| 4331 | NM_006938 | SNRPD1 | tgtacagctggaaacgctgagtattcgaggaaataacattcggtattttattctaccagacag |
| | | | tttacct |
| 4332 | NM_006963 | ZNF22 | ggccggcagcggcagaagtggggcatgactattcgatttgactcaagcttcagtagactc |
| | | | agaagaagct |
| 4333 | NM_006981 | NR4A3 | tccgtgttcgtactcccttttgtatgtttctactgttaatgccatattactatgagataatttgttgc |
| | | | at |
| 4334 | NM_007022 | CYB561D2 | tggtcatcatgaaccaggtgagcaatgcctacctataccgcaagaggatccaaccatgag |
| | | | ctcttcccag |
| 4335 | NM_007063 | TBC1D8 | gccctaaaccgagatttcagtctaccttaccaatggggcatctggctaaacaacctgacaa |
| | | | actgtggcc |
| 4336 | NM_007065 | CDC37 | aaatacgagaaacagatcaagcactttggcatgcttcgccgctgggatgacagccaaaag |
| | | | tacctgtcag |
| 4337 | NM_007079 | PTP4A3 | cctgttctcggcaccttaaattattagaccccggggcagtcaggtgctccggacacccgaa |
| | | | ggcaataaa |
| 4338 | NM_007117 | TRH | gagatgtgtacgcttatgtcggtgtcccaacgtataaactatcacagtagcgctcatggctc |
| | | | gtaggttt |
| 4339 | NM_012092 | ICOS | ataggttgctgtcagactatacccatggtgcctctgggcttgacaggtcaaaatggtcccca |
| | | | tcagcctg |
| 4340 | NM_012120 | CD2AP | tcatcctaataatgggatgagggaagtttccagcagatttcaggctgttcttaaagtttttgttg |
| | | | gtcat |
| 4341 | NM_012207 | HNRPH3 | ggaggttctggaatgggaggctacggaagagatggaatggataatcagggaggctatgg |
| | | | atcagttggaa |
| 4342 | NM_012223 | MYO1B | ttaggtgtatcaaaccgaatgataaaaaagcagcacacatcttcaacgaggctctagtgtgt |
| | | | catcagat |
| 4343 | NM_012267 | HSPBP1 | ttccataaggggggcttacacagttgccctaatgcggctggaatccccattgggggtaggt |
| | | | gagcaggca |
| 4344 | NM_012323 | MAFF | gaaactgctcttattgtgccaatatgccctccaaaccctcccaggattcaaagctaggtttgg |
| | | | ctgtctg |
| 4345 | NM_012334 | MYO10 | acacgaaaaaagaaatttgccttgtccctttgtgtacaaccatgcaaaactgtttgttggctc |
| | | | acagaag |
| 4346 | NM_012384 | GMEB2 | gaggcataaacagaaccagtcactatggaggtcgaggattcccatgtgggcccttcagct |
| | | | tgggctgctt |
| 4347 | NM_012417 | PITPNC1 | tgagatatccaggagattcattaggtcatcagcgatcaaaggttagcattttattatagatgtt |
| | | | cactgt |
| 4348 | NM_013282 | UHRF1 | tgttctacaggggcaaacagatggaggacggccataccctcttcgactacgaggtccgcc |
| | | | tgaatgacac |
| 4349 | NM_013314 | BLNK | ttgttctattgcctgacctgatgaactgttaatatctggtgaggttgagttatcatgctactaata |
| | | | tttt |
| 4350 | NM_013416 | NCF4 | gcggtagatgaggtacttggatcctccttttgtcttcacctcgatgacgaaaacctaaggag |
| | | | gacagagg |
| 4351 | NM_014005 | PCDHA6 | tacagatgtcatttgtctcccgccctaagtcctccagtctccttagagctagtacttactaagc |
| | | | atttac |
| 4352 | NM_014207 | CD5 | cttgacgaaaacagactcctctagtacttggagatcttggacgtacacctaatcccatgggg |
| | | | cctcggct |
| 4353 | NM_014232 | VAMP2 | tgaggaagggtctattgtctttttaaatggcacaattttaagggtttgagggtacagtccctta |
| | | | acctgc |
| 4354 | NM_014244 | ADAMTS2 | tgaatttgtgaacaatacaccctctccgcccttggggtaatgtactttgtgatattgccacccg |
| | | | cccccg |
| 4355 | NM_014298 | QPRT | tgggtctaataaaggatcaaccacatggggttctgcggtgataatgagcacatagtgaggg |
| | | | gtcagcaaa |
| 4356 | NM_014345 | ZNF318 | acttttagaagacgacaaatcggtaaggcttattcatggttcattgccaggagcagatatgct |
| | | | tttgaga |
| 4357 | NM_014365 | HSPB8 | gcctaaaatgggtgatatacaggtcttatatccccatatggaatttatccatcaaccacataa |
| | | | aaacaaa |
| 4358 | NM_014575 | SCHIP1 | caaaacagcaccagcaattatgtgacctgctttcgatcataagactgtgttaagaccttctcc |
| | | | tcagtgt |
| 4359 | NM_014595 | NT5C | gtgtggtttcccccggaaagatgattttgatcaagcacaggtaatcaggactgtcctcagga |
| | | | ctttatgt |
| 4360 | NM_014614 | PSME4 | ttgcagattcacatgaaagcacccagcgatgtgttgcagaaattatagctggtttaatcaga |
| | | | ggttctaa |
| 4361 | NM_014624 | S100A6 | gcagtctgatcgatcgcgatgtaagtcgcgagccggcaatcgcgtgtgcacatactcgca |
| | | | gatccttctc |
| 4362 | NM_014667 | VGLL4 | gctgcctgcagtgcgctctgaccttctcttcatgtgtgtaaatctgtaatataccattctctgtg |
| | | | gcctg |
| 4363 | NM_014707 | HDAC9 | ctggtcacgactgcaagaaactgggctgctaaataaatgtgagcgaattcaaggtcgaaa |
| | | | agccagcctg |
| 4364 | NM_014724 | ZNF305 | tttctgtaaatttgagactacctttatattctccaacacaagaccgtgtaggtgtcccttcagag |
| | | | agtat |
| 4365 | NM_014734 | KIAA0247 | atgtcgcctccatttccgaggaacatccttgcgtagagaatgaaatatgctgcaatcatttct |
| | | | gcatcct |
| 4366 | NM_014735 | PHF16 | atgtttcaagtctagtttttacaagcacattacagtaattgcaggttgtccagaggttggtttgt |
| | | | cagag |
| 4367 | NM_014780 | CUL7 | agatggcagcaaggaacccaggtcgagatgggacattgtgcggctcatcccacctcaga |
| | | | cgtacctgcaa |
| 4368 | NM_014792 | KIAA0125 | attcacatgaacgggcacatacaggaaaacacggtaatgtaattagaatagtcagagaaa |
| | | | agtagccaga |
| 4369 | NM_014824 | FCHSD2 | ctgtccgctcctgtagaaggtagggagcacaatacctagggactaagggatgttcgccgg |
| | | | ttgtggtttg |
| 4370 | NM_014890 | DOC1 | cagtttcagcgttcaaacagcaatagctcaagtgtgataactactgaggataataaaatcca |
| | | | cattcact |
| 4371 | NM_014899 | RHOBTB3 | cctagacatggaaaaacagattactgtctattgtcagcatcattttcatctgtaagtcactact |
| | | | ggaata |
| 4372 | NM_014914 | CENTG2 | ctaatacatggagttgtgcttcctaagtattgatagcggcgtatatataggattcccacaattt |
| | | | gcagtt |
| 4373 | NM_015050 | KIAA0082 | tttttcttccctaataggaggtacaatctgcttttgtttgtcgttaagtggtcactcccatttccttt |
| | | | at |
| 4374 | NM_015069 | ZNF423 | catttgcaacccagatgtaaaactctaatgatttggccatgaggcgctgctattataagcag |
| | | | ctggaaat |
| 4375 | NM_015099 | CAMTA2 | ggctccacgggcactttctacttgtgcatgggcttggtttatacgaattgccattaaacatcg |
| | | | ctgcacc |
| 4376 | NM_015147 | KIAA0582 | taaggcatgctgaaatttgttgtaaatcccaatctttactgccatggggaaaagaacgctgg |
| | | | aattttcc |
| 4377 | NM_015149 | RGL1 | tgtttcctggtggacagccgggtaatgcttttagctgctcgcatgcttgtctttctgcatctcca |
| | | | tcatc |
| 4378 | NM_015158 | ANKRD15 | atgcccatgtcaactttgcaaaagcccagtctccgggcacccctaggcttggaaggaaga |
| | | | cgtctcctgg |
| 4379 | NM_015166 | MLC1 | ctgatctgagaagacatgaacgttttctcttcaccgccgtggggtgtattgactggtccccc |
| | | | atgggctg |
| 4380 | NM_015196 | KIAA0922 | tctggactttttggttccatctgggccccgcaaagcgatgtgtatgaaaattgctgccccatc |
| | | | aacccca |
| 4381 | NM_015210 | KIAA0802 | ctccggaggtccatctccgagatcgaagaccacaaccggcaactgacccacgagctcag |
| | | | caagtttaagt |
| 4382 | NM_015261 | KIAA0056 | agtggtctctagaggtgatcagttcagctgttgacgccttgcagaggctttgtagagcatct |
| | | | gcagagac |
| 4383 | NM_015335 | THRAP2 | ccagattgcaaagagttatggatattctggtggggagatgaacccaacctagtgggtgtaa |
| | | | tacatcatg |
| 4384 | NM_015436 | RCHY1 | aaatatgtttgatgatccagccgactttgacactgttatctccgtaatagctttaccattaggct |
| | | | aggat |
| 4385 | NM_015458 | MTMR9 | aacttgtgagggagtttgtattaggtctggtcatggagggatgatgtaccatcaaggtagac |
| | | | ccatcttc |
| 4386 | NM_015474 | SAMHD1 | gatttattccacttgctcgcccggaggtgaaatggacgcatgaacaaggctcagttatgatg |
| | | | tttgagca |
| 4387 | NM_015528 | RNF167 | tgatgaaggggagccaagggaccaccctgcctcagaaaggaccccacttttgggttctag |
| | | | ccccactctt |
| 4388 | NM_015568 | PPP1R16B | ctcagccagaacctcttggtgtacccgataagctgcaggttatcccttgctctgtgcgccttt |
| | | | tatttgt |
| 4389 | NM_015570 | AUTS2 | caagtctgggaacagccgtaacaggtcaaccttgtggagccatcgcgagttagagggtg |
| | | | aaagatggcag |
| 4390 | NM_015636 | EIF2B4 | gcggggagaacatgttgcgctggctaactggcagaaccacgcatccctacggttgttgaa |
| | | | tctagtctat |
| 4391 | NM_015670 | SENP3 | cgctgccctaagcatattgccaagtatctacaggcagaggcggtaaagaaagaccgact |
| | | | ggatttccacc |
| 4392 | NM_015710 | GLTSCR2 | cgtgagatccagttgtagctgccatcagatgccggagactcgcccttcaataaaaaatctct |
| | | | tctagctg |
| 4393 | NM_015833 | ADARB1 | atgaactgaacggttaaaagcacagtctatggaacgctaatggagtcagcccctaaagct |
| | | | gtttgctttt |
| 4394 | NM_015855 | WIT-1 | gctccccgagagtcctcagtgaaaggattccgcggcactgcctctattattataccgtaaat |
| | | | ctttttaa |
| 4395 | NM_015869 | PPARG | aataaggaggttctttatggaataaacaggtattaagctatttaaaggagagggctgcgaaa |
| | | | tgcttgat |
| 4396 | NM_015965 | GRIM19 | aaatcgaggacttcgaggctcgcatcgcgctgttgccactgttacaggcagaaaccgacc |
| | | | ggaggacctt |
| 4397 | NM_016041 | DERL2 | taacatacctccaacaccgtcatacatatacctccgctacgcaaccttacctagttacgccc |
| | | | caattgta |
| 4398 | NM_016091 | EIF3S6IP | ttcgctctttccggcggtgctcgcaagcgaggcagccatgtcttatcccgctgatgattatg |
| | | | agtctgag |
| 4399 | NM_016184 | CLECSF6 | ttcttattcatgtgtaagggaggtccatagaatttaggtggtctgtcaactattctacttatgag |
| | | | agaat |
| 4400 | NM_016195 | MPHOSPH1 | tggcagtgaaacaccctggttgtaccacaccagtgacagttaagattcccaaggctcgga |
| | | | agaggaagag |
| 4401 | NM_016221 | DCTN4 | atgataacccaaaggtagacctgctgttaatgatccagcattggtcacaatgtaccaactgc |
| | | | tttctgca |
| 4402 | NM_016308 | UMP-CMPK | caagagtaaagactaaggtttcgagagcattcctactcacataagtgaagaaatctgtcag |
| | | | ataggaatc |
| 4403 | NM_016343 | CENPF | gctggagatagaccttttaaagtctagtaaagaagagctcaataattcattgaaagctactac |
| | | | tcagatt |
| 4404 | NM_016570 | PTX1 | aagttacttaaacctgagctttaggacctttaaaatctcagcatgccttttaagctagtactttt |
| | | | cctgt |
| 4405 | NM_016734 | PAX5 | aggcccaataatatttggaccaagtgggaaacaagaacactcggaggggcgggaatca |
| | | | gaagagcctgga |
| 4406 | NM_017437 | CPSF2 | ctttctgtatttgcgtctttcttgtgactaaccaccctgatatagtattaaccactgtgttcaaga |
| | | | gtaa |
| 4407 | NM_017448 | LDHC | tgtgtcttggggcggaatggtgtctcagatgttgtgaaaattaacttgaattctgaggaggag |
| | | | gcccttt |
| 4408 | NM_017617 | NOTCH1 | tgtcaaacatgagatgtgtggactgtggcacttgcctgggtcacacacggaggcatcctac |
| | | | ccttttctg |
| 4409 | NM_017771 | PXK | catgagccgaggggccttgctcagctccatccagaatttccaaaaaggaactttgaggaa |
| | | | agccaaaacc |
| 4410 | NM_017787 | C10orf26 | ttcaatgacaggcttggactagctgtggcccagacatcggccctgcccagaattgccagg |
| | | | aggaggcttt |
| 4411 | NM_017794 | KIAA1797 | tgacagcttgacacatgcctcctaagagaggagtgcattgctttagtacccgggccagttg |
| | | | agactgaaa |
| 4412 | NM_018136 | ASPM | agagcctctgatgtacgaagtaggtccaaagttgttgaccgtatttacagtctctacaaactt |
| | | | acagctc |
| 4413 | NM_018209 | ARFGAP1 | gagctgtcagcgacgtgaggtgtcccttctcgttgagatatttaactttggttttgctctagttc |
| | | | tttct |
| 4414 | NM_018248 | FLJ10858 | gcaagctaccgactagaaatactataatcagttggacatctagcagggtggatcatgttatg |
| | | | gactccgt |
| 4415 | NM_018462 | C3orf10 | agcccttgaacggagaatagagtacattgaagctcgggtgacaaaaggtgagacactca |
| | | | cctagaacagt |
| 4416 | NM_018664 | SNFT | ctcctgggcaaggggctgttgtgagcccattggtatagcaactagtggtgctgtctactgca |
| | | | aagcaaat |
| 4417 | NM_018951 | HOXA10 | gaggactggggtaagcggaataaactagagaagggagacattgtttggatttcctttatact |
| | | | gtgaagtt |
| 4418 | NM_019028 | ZDHHC13 | ttgtccctcaggaagacaccatacaatcttggattcatgcagaacctggcagatttctttcag |
| | | | tgtggct |
| 4419 | NM_019071 | ING3 | tgcagttcatgagggagggggcgggggactgaaggggaaagggcgttaaagtgataca |
| | | | tttttataccaa |
| 4420 | NM_019102 | HOXA5 | atggagatcatagttccgtgagcgagcaattcagggactcggcgagcatgcactccggc |
| | | | aggtacggcta |
| 4421 | NM_019111 | HLA-DRA | acaaagcgctccaactatacttcgatcaccaatgtacctccagacgtaactgtgctcacaa |
| | | | acagccctg |
| 4422 | NM_019841 | TRPV5 | tgcctatgcaagtgtctaacttctgtgcctgttaatcatgggagggtgagacagaacaatcc |
| | | | ctaaaggg |
| 4423 | NM_019846 | CCL28 | catcaggggaaacacgaaacatacggccataaaactccttattagagagtctacagataa |
| | | | atctacagag |
| 4424 | NM_019857 | CTPS2 | acaacgacccccgcgttttccccgtactagatggttagggcgcatagtgccgaactacgct |
| | | | gctgctaca |
| 4425 | NM_020310 | MNT | ctgcaaatctagtgccgaaatctagtgccgaatgactatgtccagattggtgacgatgggt |
| | | | gttgctgtt |
| 4426 | NM_020368 | SAS10 | gcttagggaaatttcacagttcattgtggagtgttaaacttagaacatgtgtaacttttcacata |
| | | | aagag |
| 4427 | NM_020371 | AVEN | ggctgtccttcaggaccagccagtttacaagcatgtctcaagctagtgtgttccattatgctc |
| | | | acagcag |
| 4428 | NM_020657 | ZNF304 | acaaaaggagattcgaacattctagaggggacatccacaagtctcggtgcagttatgatg |
| | | | gtgtgggatg |
| 4429 | NM_020841 | OSBPL8 | gtgaagcggttggatccattactcaacccttacctagcagttatttgatcatccgagctacttc |
| | | | agagtc |
| 4430 | NM_020843 | ZNF291 | tgtttagtaacaagattaccttcttaatggacctcctgatacaccagttgacggtttatgttcca |
| | | | gatga |
| 4431 | NM_020892 | DTX2 | agcaggtctgcagtgatcagatgggtttctcacatattgttaagttgaaagtagccgtggctc |
| | | | agtatga |
| 4432 | NM_020944 | GBA2 | aggggccatgggggctgtgaatgggatgcagccccatggtgtccctgataaatccagtgt |
| | | | gcagtctgat |
| 4433 | NM_020956 | PRX | cacagctgcccgccgtggaaattgaggaagggcggctggagatgatagagacaaaagt |
| | | | caagccctcttc |
| 4434 | NM_020998 | MST1 | cccctgaatgaacaaagtgtggacatgccaatacacattactgacaggtatgcccacctga |
| | | | cctgcaccc |
| 4435 | NM_021019 | MYL6 | gaaaggcgagcaaccagaacagagcacaacaaaggacgagcagcgccagccgagac |
| | | | gacgtaaggacaca |
| 4436 | NM_021038 | MBNL1 | ttaatgcgaacagacagacttgaggtatgtcgagagtaccaacgtggcaattgcaaccga |
| | | | ggagaaaatg |
| 4437 | NM_021071 | DO | gcatctctctcctttttgaccagtgtcatcatcttttccaaaagcagagtataaagaaatcttgt |
| | | | ggctc |
| 4438 | NM_021103 | TMSB10 | ctgggggtgaaatcttacagcgcgggttccgttacctttcccggatacttttccgggaatgat |
| | | | gtacaca |
| 4439 | NM_021111 | RECK | tacagataattacctactctggctagaagctaggggtcccagtgaagagccactgccatta |
| | | | aagaatatg |
| 4440 | NM_021114 | SPINK2 | tacgctcacccacctcactatactctcccttatcgcgcgtctatatggccccgatcacccttc |
| | | | cgccttg |
| 4441 | NM_021643 | TRIB2 | ccgcccgagactccgaacttgtcgcattgcgtttcttgtatcgggaaatacttattgttggaa |
| | | | cctctgg |
| 4442 | NM_021814 | ELOVL5 | gcagtgtattacttatgtgtttgtggagatgttggtgtaaacctactgcactgctaattctataa |
| | | | aagta |
| 4443 | NM_021906 | USP9X | taacttacatggaaagcatgagactatatgctagagaccatgaagattatgacccacaaac |
| | | | tgtgaggct |
| 4444 | NM_021949 | ATP2B3 | ttgtaaactgttccctgatgtccttgtttaaacgataataagaaaaagggcaactccatttgtt |
| | | | gagggt |
| 4445 | NM_021960 | MCL1 | tctggttaaacagctgtacttttgatagctgtgccaggaagggttaggaccaactacaaatta |
| | | | atgttgg |
| 4446 | NM_022067 | C14orf133 | ggttgtcgaaattttgcacaagaacaatgcccctgtgcagatattacaggagtatgtcaatct |
| | | | ggtggaa |
| 4447 | NM_022127 | SLC28A3 | atcgggtccctaggaatcgtgatcggcggactcacgtccatggctccttccagaaagcgt |
| | | | gatatcgcct |
| 4448 | NM_022161 | BIRC7 | catttctgctgcaaacctggtcagagccagtgttccctccatgggacctaaagacagtgcc |
| | | | aagtgcctg |
| 4449 | NM_022334 | ITGB1BP1 | aattggagtttactgtcatctgtttccgtttctctaagatagggatcctggcgaagcccatgaa |
| | | | agccat |
| 4450 | NM_022366 | TFB2M | tatgatgaaaccctggaagataggtagcaactagactgtcgtttttggtggagcggttcattt |
| | | | atttgga |
| 4451 | NM_022436 | ABCG5 | ccagagttaaatgcagatgtccacacgaggggtcggagttacctgatcacatcgagagag |
| | | | tgctgggcag |
| 4452 | NM_022438 | MAL | aaatcagtgcaatgaagactttggatttattaaaaccaagttgtccctaaggaatcagatgtg |
| | | | ggcatct |
| 4453 | NM_022469 | GREM2 | tagcaatgaaagcaatatgatatgctgcagtgtgaagctccttctggggttatcgtatgtaca |
| | | | aagttta |
| 4454 | NM_022549 | FEZ1 | atgcagattcctggtatcacttgctcgctactttctagggtcttaatagtagtcaagaaaagg |
| | | | gatctga |
| 4455 | NM_022716 | PRRX1 | ggaattgcagttagagagagtaaggaataccatttagtcatctatccgttcttcacttagcag |
| | | | gaatatg |
| 4456 | NM_024006 | VKORC1 | caatgatcagctcccgcgactgctacgtgctcattagtgttcgtccgacgacgaccgtcata |
| | | | tgtccacc |
| 4457 | NM_024319 | C1orf35 | ataccagggatggcccctggcttggcctgcgaaggtgaacctgcccagatttatcagtag |
| | | | aggctggact |
| 4458 | NM_024408 | NOTCH2 | ctgtttgtatgagaaacccagtaaccaataaaatgaccgcatattcctgactaaacgtagta |
| | | | aggaaaat |
| 4459 | NM_024424 | WT1 | ctacaagacactgcccccacgctctctgctcagtcctctcccacacgatctatccctaaacc |
| | | | tttcgcgg |
| 4460 | NM_024713 | C15orf29 | tgcacgtctgtgatttgagaggtgagttatttaagaggccagttttcaggacatgggaatttg |
| | | | aattgta |
| 4461 | NM_024728 | C7orf10 | tccagaatggctctggtattaatgaatctagtgccttttaaatgtatcccacgttttgttccctac |
| | | | catc |
| 4462 | NM_025263 | PRR3 | gcctttctcagtgtccgtggcatttttgtgacttcccagcactagaataagttttcctgccaaa |
| | | | atgagt |
| 4463 | NM_030660 | ATXN3 | acagttgagtcatggaatgtaggtgtctgcttcacatcttttagtaggtatagcttgtcaaaga |
| | | | tggtga |
| 4464 | NM_030674 | SLC38A1 | cagatgggtgatttaagtgagtcacaagtcacaaaactttgctattcatagttaatcaaatag |
| | | | aactggg |
| 4465 | NM_030915 | LBH | tttcagtaaaaatgcctgttgtgagatgaacctcctgtaacttctatctgttcttttttgaggctc |
| | | | aggg |
| 4466 | NM_030926 | ITM2C | cattcgatatgctaaccgttctcagccctgagccttggagaggagggctgtaacgccttca |
| | | | gtcagtctc |
| 4467 | NM_030935 | THG-1 | cccacgatgccagcctggttcacaaatctccagaccccttcggagcagtagcagctcaga |
| | | | agttcagcct |
| 4468 | NM_031243 | HNRPA2B1 | gacagtttcttagctttttaattgttgtttctttctagtggtctttgtaagagtgtagaagcattcct |
| | | | tc |
| 4469 | NM_031423 | CDCA1 | gagactgctgatattctatgtccaaaagcaaaacggacaagtcggtttttaagtggcattatc |
| | | | aacttta |
| 4470 | NM_031966 | CCNB1 | ccttttggtttacctggggatccaattgatgtatatgtttatatactgggttcttgttttatatacct |
| | | | gg |
| 4471 | NM_032121 | DKFZp564K142 | atgaatggagacaagttccgtcgccttgtgaaagccccaccgagaaattactccgttatcgt |
| | | | catgttca |
| 4472 | NM_033238 | PML | acagaaactgatgttccatgcatgttcctgcttccaaagcctgaccttccaaagcttgcttcc |
| | | | ttcctcc |
| 4473 | NM_033512 | TSPYL5 | ggatgcctagttgaggatgttcccaaagttttgtccaatcttatcattagtagattttataagcc |
| | | | acaga |
| 4474 | NM_033554 | HLA-DPA1 | ccccacactcgcgagaacgaccaaaaatgaaacgaatacggccggaaaccgatcccat |
| | | | gtgccgggccaa |
| 4475 | NM_033642 | FGF13 | ccaaacaaacaggcagagttcactattctatctgccattagaccttcttatcatccatactaaa |
| | | | gcccca |
| 4476 | NM_057168 | WNT16 | ggataagatccttgaatatggaacttagttacaggactcaataatggtgggtgaacattagt |
| | | | cattttta |
| 4477 | NM_058195 | CDKN2A | gctcttctgttcctgcgacacctctgttctatgatcttcgctcttgttgtttctcaccatgtgtcag |
| | | | ctg |
| 4478 | NM_080284 | ABCA6 | acgacaggagtctagttccactgtggaattcctttctggttgtacatttgctaggtagtgacaa |
| | | | ctaatg |
| 4479 | NM_130439 | MXI1 | cctcactctttatagtgcacaaaatgaatgaggtctgggctaggtagaaaaagggtcaatg |
| | | | ctatttttg |
| 4480 | NM_133259 | LRPPRC | atttccaatcagtttgattgggctctaatgagactagatctttctgttcgaagaactggccgca |
| | | | ttccaa |
| 4481 | NM_133378 | TTN | cagtactacctgggttgagttagcaaccaccgttatacgtactacctataaagccacccgc |
| | | | cttactact |
| 4482 | NM_138714 | NFAT5 | tccagtaaaaaactcctgcactgaagtcattgtgacttgagtagttacagactgattccagtg |
| | | | aacttga |
| 4483 | NM_144578 | C14orf32 | cctggataaaggcactttcactgcctgtcactgatcagcagatactgacttgttgccattaag |
| | | | tgaactt |
| 4484 | NM_144628 | TBC1D20 | actaatcacctcttctgtcattccgtccttggccaccgctcagtgggaatggtctctgatctg |
| | | | gatgctc |
| 4485 | NM_145698 | ACBD5 | ttacaagcagtctgggataactaactcctagggataaccatttctatcctgttccaaagtctta |
| | | | ttttat |
| 4486 | NM_147180 | PPP3R2 | gtggcaatgaccttgaactgagagcctgtatctggatttagcacttgaaagatctaactgga |
| | | | tatttggg |
| 4487 | NM_152739 | HOXA9 | ttgaatattgtttttgcaccagacgaacagtgaggaaattcggagctatacatatgtgcagaa |
| | | | ggttact |
| 4488 | NM_152788 | EB-1 | ggttgatgtatttagcttgaatccttcactttagtggtctaatcaacagataaatgacaagcaa |
| | | | agaatg |
| 4489 | NM_152827 | SNX3 | agaaagtatcttcctccaggcttgtaatacccttcacatggaagattaatgagggaaatcttt |
| | | | atattct |
| 4490 | NM_152890 | COL24A1 | acccagcacgaatctgcaaagatttacttaactgtgaacaaaaagtatcagatggaaaata |
| | | | ctggattga |
| 4491 | NM_173156 | C1orf16 | agtctcccagcctccactttcagagtgaaattcaaggcagcacggacatgtgcccatcag |
| | | | gcacagaaga |
| 4492 | NM_173216 | SIAT1 | ggtggcattccgacagcaggacatacatgttggtgtgaagactgggacgacactgggtag |
| | | | aatctagttt |
| 4493 | NM_173609 | C15orf21 | actgagatagaaggaccagccactttgaacgccttagaggcaaaaagagctttgtgagtt |
| | | | gtaagaggaa |
| 4494 | NM_173852 | KRTCAP2 | agagagccccggatttctcctggactccatgtgcagatgcctagtatttccattctgaccgtt |
| | | | gccctcc |
| 4495 | NM_175739 | SERPINA9 | ctgagaaagtggagccactcactccagaaaaggtggatagaggtgttcatccccagatttt |
| | | | ccatttctg |
| 4496 | NM_175744 | RHOC | ttgttttcggcaggggccttgtctctcactgcatttggtcaggggggcatgaataaaggcta |
| | | | caggctcc |
| 4497 | NM_178586 | PPP2R5C | ctgtacatcagaaatgtcactattccaagtgtctttttagtgtggctttagtatggcttccttttaa |
| | | | tat |
| 4498 | NM_181311 | TAZ | accagggaaagtgaacatgagttccgaattcctgcgtttcaagtggggaatcgggcgcct |
| | | | gattgctgag |
| 4499 | NM_181336 | LEMD2 | atgtctggatgatcggcagggcaggaatctgagcgctggccccgtggtgaggccatgttc |
| | | | tcataatcag |
| 4500 | NM_181339 | IL24 | cctaggcaaagagtatatgtaggaggtgggatatcacttccatgacataagtgctattgcag |
| | | | agccgtgg |
| 4501 | NM_181430 | FOXK2 | tggtatgtttgtatttggggtgtccctccggctctaggcggcctctgacctgctgtctactccc |
| | | | cacctt |
| 4502 | NM_181493 | ITPA | tggcttctgctgtcgtgtccatccttccttcgtctggctcgtgattcacttattcgccctccctac |
| | | | tttg |
| 4503 | NM_181702 | GEM | tgtggtttcccccattgtagcagggagctagcgtattagccttgtgggcaacatgatgcatg |
| | | | ggaaatga |
| 4504 | NM_182729 | TXNRD1 | gctggtctaagcaagctgagatcatttgcaatggaaaacacgtaacttgtttaaaagtttttct |
| | | | ggtagc |
| 4505 | NM_182810 | ATF4 | aaaagggtcccctagttgaggatagtcaggagcgtcaatgtgcttgtacatagagtgctgt |
| | | | agctgtgtg |
| 4506 | NM_183395 | CIAS1 | agacaccaggacaatgacagcatcgggtgttgttgtcatcacagcgcctcagttagagga |
| | | | tgttcctctt |
| 4507 | NM_198232 | RNASE1 | ccttgtccgggcgcaacatgcaattatattaaactcggccaaaccctctgcgggataaagg |
| | | | ggttttgtt |
| 4508 | NM_198400 | NEDD4 | ggatgattctgtgactcatagaacatgatgttaaatgagaccagactcaactgccaccagtc |
| | | | cccagctg |
| 4509 | NM_199335 | FYB | gaccccgaagatggtgcagcttggatagtgaatgtgcaagttagctatgcagagtgtactt |
| | | | ccttttctg |
| 4510 | NM_199423 | WWP2 | ctcactttgaaagtggtgtccgcaaagcccaaggtgcataatcgtcaacctcgaattaactc |
| | | | ctacgtgg |
| 4511 | NM_201592 | GPM6A | tagtaggtagggggtactactagggatatctgtggcatgattatgcattccgtagtattattta |
| | | | attaat |
| 4512 | NM_201632 | TCF7 | agcggcatgtacaaagagaccgtctactccgccttcaatctgctcatgcattacccacccc |
| | | | cctcgggag |
| 4513 | NM_201998 | SF1 | aaagttgccgagggtaggttcatctccaggtttcgggattcccatccgtcctggcgatcctg |
| | | | ccagcagt |
| 4514 | NM_212474 | FN1 | ttgttaccgtgggcaactctgtcaacgaaggcttgaaccaacctacggatgactcgtgcttt |
| | | | gaccccta |
| 4515 | R14777 | CYFIP2 | tcctttcacccaagaaccacaacgagacaaacctgccaacgtccagccttattacctctatg |
| | | | gatccaag |
| 4516 | R56397 | PIK3C3 | cgtaaacagtgttacacggctttcctccacctgcgaaggtattctaatctgattttgaacttgtt |
| | | | ttcct |
| 4517 | R59027 | GRP58 | ctcctccagcctcattgaaactctttttgtggatttgatgaccttatggatattgccaaagtttaa |
| | | | ggca |
| 4518 | R72151 | GNL3 | gcagactgctaaactgttctctgtataagttatggtatgcatgagctgtgtaaattttgtgaata |
| | | | tgtat |
| 4519 | R79128 | MAP3K1 | aagtcttactctgtatgtaacaatccatcattcaccttcactactggtagtaacatagagctgc |
| | | | catttt |
| 4520 | R86893 | C6orf110 | tgcacagttctcgaagcccgcccgtgttacaacgtggctcgcctaatgttcctcgatgcag |
| | | | agaggaaga |
| 4521 | T07281 | NRIP1 | gtgagaaagggcatacatccacagattcactttgtttatgcatatgtagatacaaggatgca |
| | | | catataca |
| 4522 | T28925 | ITGAL | tttccctgtttaatgattgacgtacttagcagctatctctcagtgaactgtgagggtaaaggct |
| | | | atactt |
| 4523 | U60115 | FHL1 | aatacatactaacattcttgtaggagtggttagagaagctgatgcctcatttctacattctgtc |
| | | | attagc |
| 4524 | U79271 | AKT3 | acattcatctggtttagacttaatatgccacaacgcaccacgaccttcccagggtgacacc |
| | | | gcctcagcc |
| 4525 | W04885 | MYL4 | cagtacatccccgcactgggcgtaggtgattttcatctctccagtcggggtccggtcaaac |
| | | | aatgaaaag |
| 4526 | X66087 | MYBL1 | acttagggatggctcattgaacgatggtggtaatatggcgctaaaacatacaccactgaaa |
| | | | acactacca |
| 4527 | AK024272 | | gtgatgttataaatgaggggagtaaaggaacatgagataaccactaatatgacataccaat |
| | | | agactatga |
| 4528 | AK025231 | IGLC2 | agcaacaggcggcgagtcaaaacccaaggtgtgtttatctaaactgggcaattcctcttcta |
| | | | ggaattta |
| 4529 | AL080190 | | taaagcgaggaagcagatgccaggcagtgaagacttgcacaccgtcacactgttaactg |
| | | | gtagagaggca |
| 4530 | BU618233 | | cgataaatccctttaatctcctctacatatactgagtattaaaaaacagaatcggctagaaca |
| | | | ttgttgc |

[0085] The polynucleotide probes of an HCP combination can comprise RNA, DNA, RNA or DNA mimetics, or combinations thereof, and can be single-stranded or double-stranded. Thus the polynucleotide probes can be composed of naturally-occurring nucleobases, sugars and covalent internucleoside (backbone) linkages as well as polynucleotide probes having non-naturally-occurring portions which function similarly. Such modified or substituted polynucleotide probes may provide desirable properties such as, for example, enhanced affinity for a target gene and increased stability.

[0086] As is known in the art, a nucleoside is a base-sugar combination and a nucleotide is a nucleoside that further includes a phosphate group covalently linked to the sugar portion of the nucleoside. In forming oligonucleotides, the phosphate groups covalently link adjacent nucleosides to one another to form a linear polymeric compound, with the normal linkage or backbone of RNA and DNA being a 3′ to 5′ phosphodiester linkage. Specific examples of polynucleotide probes useful in this invention include oligonucleotides containing modified backbones or non-natural internucleoside linkages. As defined in this specification, oligonucleotides having modified backbones include both those that retain a phosphorus atom in the backbone and those that lack a phosphorus atom in the backbone. For the purposes of the present invention, and as sometimes referenced in the art, modified oligonucleotides that do not have a phosphorus atom in their internucleoside backbone can also be considered to be oligonucleotides.

[0087] Exemplary polynucleotide probes having modified oligonucleotide backbones include, for example, those with one or more modified internucleotide linkages that are phosphorothioates, chiral phosphorothioates, phosphorodithioates, phosphotriesters, aminoalkylphosphotriesters, methyl and other alkyl phosphonates including 3′-alkylene phosphonates and chiral phosphonates, phosphinates, phosphoramidates including 3′amino phosphoramidate and aminoalkylphosphoramidates, thionophosphoramidates, thionoalkyl-phosphonates, thionoalkylphosphotriesters, and boranophosphates having normal 3′-5′ linkages, 2′-5′ linked analogs of these, and those having inverted polarity wherein the adjacent pairs of nucleoside units are linked 3′-5′ to 5′-3′ or 2′-5′ to 5′-2′. Various salts, mixed salts and free acid forms are also included.

[0088] Exemplary modified oligonucleotide backbones that do not include a phosphorus atom are formed by short chain alkyl or cycloalkyl internucleoside linkages, mixed heteroatom and alkyl or cycloalkyl internucleoside linkages, or one or more short chain heteroatomic or heterocyclic internucleoside linkages. Such backbones include morpholino linkages (formed in part from the sugar portion of a nucleoside); siloxane backbones; sulfide, sulfoxide and sulphone backbones; formacetyl and thioformacetyl backbones; methylene formacetyl and thioformacetyl backbones; alkene containing backbones; sulphamate backbones; methyleneimino and methylenehydrazino backbones; sulphonate and sulfonamide backbones; amide backbones; and others having mixed N, O, S and CH₂ component parts.

[0089] The present invention also contemplates oligonucleotide mimetics in which both the sugar and the internucleoside linkage of the nucleotide units are replaced with novel groups. The base units are maintained for hybridization with an appropriate nucleic acid target compound. An example of such an oligonucleotide mimetic, which has been shown to have excellent hybridization properties, is a peptide nucleic acid (PNA) [Nielsen et al., Science, 254:1497-1500 (1991)]. In PNA compounds, the sugar-backbone of an oligonucleotide is replaced with an amide containing backbone, in particular an aminoethylglycine backbone. The nucleobases are retained and are bound directly or indirectly to aza-nitrogen atoms of the amide portion of the backbone.

[0090] The present invention also contemplates polynucleotide probes comprising “locked nucleic acids” (LNAs), which are novel conformationally restricted oligonucleotide analogues containing a methylene bridge that connects the 2′-O of ribose with the 4′-C (see, Singh et al., Chem. Commun., 1998, 4:455-456). LNA and LNA analogues display very high duplex thermal stabilities with complementary DNA and RNA, stability towards 3′-exonuclease degradation, and good solubility properties. Synthesis of the LNA analogues of adenine, cytosine, guanine, 5-methylcytosine, thymine and uracil, their oligomerization, and nucleic acid recognition properties have been described (see Koshkin et al., Tetrahedron, 1998, 54:3607-3630). Studies of mismatched sequences show that LNA obey the Watson-Crick base pairing rules with generally improved selectivity compared to the corresponding unmodified reference strands.

[0091] LNAs form duplexes with complementary DNA or RNA or with complementary LNA, with high thermal affinities. The universality of LNA-mediated hybridization has been emphasized by the formation of exceedingly stable LNA:LNA duplexes (Koshkin et al., J. Am. Chem. Soc., 1998, 120:13252-13253). LNA:LNA hybridization was shown to be the most thermally stable nucleic acid type duplex system, and the RNA-mimicking character of LNA was established at the duplex level. Introduction of three LNA monomers (T or A) resulted in significantly increased melting points toward DNA complements.

[0092] Synthesis of 2′-amino-LNA (Singh et al., J. Org. Chem., 1998, 63, 10035-10039) and 2′-methylamino-LNA has been described and thermal stability of their duplexes with complementary RNA and DNA strands reported. Preparation of phosphorothioate-LNA and 2′-thio-LNA have also been described (Kumar et al., Bioorg. Med. Chem. Lett., 1998, 8:2219-2222).

[0093] Modified polynucleotide probes may also contain one or more substituted sugar moieties. For example, oligonucleotides may comprise sugars with one of the following substituents at the 2′ position: OH; F; O-, S-, or N-alkyl; O-, S-, or N-alkenyl; O-, S- or N-alkynyl; or O-alkyl-O-alkyl, wherein the alkyl, alkenyl and alkynyl may be substituted or unsubstituted C₁ to C₁₀ alkyl or C₂ to C₁₀ alkenyl and alkynyl. Examples of such groups are: O[(CH₂)ₙO]ₘCH₃, O(CH₂)ₙOCH₃, O(CH₂)ₙNH₂, O(CH₂)ₙCH₃, O(CH₂)ₙONH₂, and O(CH₂)ₙON[(CH₂)ₙCH₃)]₂, where n and m are from 1 to about 10. Alternatively, the oligonucleotides may comprise one of the following substituents at the 2′ position: C₁ to C₁₀ lower alkyl, substituted lower alkyl, alkaryl, aralkyl, O-alkaryl or O-aralkyl, SH, SCH₃, OCN, Cl, Br, CN, CF₃, OCF₃, SOCH₃, SO₂CH₃, ONO₂, NO₂, N₃, NH₂, heterocycloalkyl, heterocycloalkaryl, aminoalkylamino, polyalkylamino, substituted silyl, an RNA cleaving group, a reporter group, an intercalator, a group for improving the pharmacokinetic properties of an oligonucleotide, or a group for improving the pharmacodynamic properties of an oligonucleotide, and other substituents having similar properties. Specific examples include 2′-methoxyethoxy (2′-O—CH₂CH₂OCH₃, also known as 2′-O-(2-methoxyethyl) or 2′-MOE) [Martin et al., Helv. Chim. Acta, 78:486-504 (1995)], 2′-dimethylaminooxyethoxy (O(CH₂)₂ON(CH₃)₂ group, also known as 2′-DMAOE), 2′-methoxy (2′-O—CH₃), 2′-aminopropoxy (2′-OCH₂CH₂CH₂NH₂) and 2′-fluoro (2′-F).

[0094] Similar modifications may also be made at other positions on the polynucleotide probes, particularly the 3′ position of the sugar on the 3′ terminal nucleotide or in 2′-5′ linked oligonucleotides and the 5′ position of 5′ terminal nucleotide. Polynucleotide probes may also have sugar mimetics such as cyclobutyl moieties in place of the pentofuranosyl sugar.

[0095] Polynucleotide probes may also include modifications or substitutions to the nucleobase. As used herein, “unmodified” or “natural” nucleobases include the purine bases adenine (A) and guanine (G), and the pyrimidine bases thymine (T), cytosine (C) and uracil (U). Modified nucleobases include other synthetic and natural nucleobases such as 5-methylcytosine (5-me-C), 5-hydroxymethyl cytosine, xanthine, hypoxanthine, 2-aminoadenine, 6-methyl and other alkyl derivatives of adenine and guanine, 2-propyl and other alkyl derivatives of adenine and guanine, 2-thiouracil, 2-thiothymine and 2-thiocytosine, 5-halouracil and cytosine, 5-propynyl uracil and cytosine, 6-azo uracil, cytosine and thymine, 5-uracil (pseudouracil), 4-thiouracil, 8-halo, 8-amino, 8-thiol, 8-thioalkyl, 8-hydroxyl and other 8-substituted adenines and guanines, 5-halo particularly 5-bromo, 5-trifluoromethyl and other 5-substituted uracils and cytosines, 7-methylguanine and 7-methyladenine, 8-azaguanine and 8-azaadenine, 7-deazaguanine and 7-deazaadenine and 3-deazaguanine and 3-deazaadenine. Further nucleobases include those disclosed in U.S. Pat. No. 3,687,808; The Concise Encyclopedia Of Polymer Science And Engineering, (1990) pp 858-859, Kroschwitz, J. I., ed. John Wiley & Sons; Englisch et al., Angewandte Chemie, Int. Ed., 30:613 (1991); and Sanghvi, Y. S., (1993) Antisense Research and Applications, pp 289-302, Crooke, S. T. and Lebleu, B., ed., CRC Press. Certain of these nucleobases are particularly useful for increasing the binding affinity of the polynucleotide probes of the invention. These include 5-substituted pyrimidines, 6-azapyrimidines and N-2, N-6 and O-6 substituted purines, including 2-aminopropyladenine, 5-propynyluracil and 5-propynylcytosine. 5-methylcytosine substitutions have been shown to increase nucleic acid duplex stability by 0.6-1.2° C. [Sanghvi, Y. S., (1993) Antisense Research and Applications, pp 276-278, Crooke, S. T. and Lebleu, B., ed., CRC Press, Boca Raton].

[0096] One skilled in the art will recognise that it is not necessary for all positions in a given polynucleotide probe to be uniformly modified. The present invention, therefore, contemplates the incorporation of more than one of the aforementioned modifications into a single polynucleotide probe or even at a single nucleoside within the probe.

[0097] One skilled in the art will also appreciate that the nucleotide sequence of the entire length of the polynucleotide probe does not need to be derived from the target gene. Thus, the polynucleotide probe may comprise nucleotide sequences at the 5′ and/or 3′ termini that are not derived from the target gene. Nucleotide sequences which are not derived from the nucleotide sequence of the target gene may provide additional functionality to the polynucleotide probe. For example, they may provide a restriction enzyme recognition sequence or a “tag” that facilitates detection, isolation, purification or immobilisation onto a solid support. Alternatively, the additional nucleotides may provide a self-complementary sequence that allows the primer/probe to adopt a hairpin configuration. Such configurations are necessary for certain probes, for example, molecular beacon and Scorpion probes, which can be used in solution hybridization techniques.

[0098] The polynucleotide probes can incorporate moieties useful in detection, isolation, purification, or immobilisation, if desired. Such moieties are well-known in the art (see, for example, Ausubel et al., (1997 & updates) Current Protocols in Molecular Biology, Wiley & Sons, New York) and are chosen such that the ability of the probe to hybridize with its target sequence is not affected.

[0099] Examples of suitable moieties are detectable labels, such as radioisotopes, fluorophores, chemiluminophores, enzymes, colloidal particles, and fluorescent microparticles, as well as antigens, antibodies, haptens, avidin/streptavidin, biotin, haptens, enzyme cofactors/substrates, enzymes, and the like.

### 1.2.1 Preparation of Polynucleotide Probes

[0100] The polynucleotide probes of the present invention can be prepared by conventional techniques well-known to those skilled in the art. For example, the polynucleotide probes can be prepared using solid-phase synthesis using commercially available equipment, such as the equipment available from Applied Biosystems Canada Inc., Mississauga, Canada. As is well-known in the art, modified oligonucleotides, such as phosphorothioates and alkylated derivatives, can also be readily prepared by similar methods. The polynucleotide probes can also be synthesized directly on a solid support according to methods standard in the art. This method of synthesizing polynucleotides is particularly useful when the polynucleotide probes are part of a nucleic acid array.

[0101] Alternatively, the polynucleotide probes of the present invention can be prepared by enzymatic digestion of the naturally occurring target gene, or mRNA or cDNA derived therefrom, by methods known in the art.

### 1.2.2 Testing of Polynucleotide Probes

[0102] Each polynucleotide probe suitable for use in the HCP combination must be able to specifically detect the expression of a target gene in the HCP set. As noted previously, the specificity or uniqueness of the polynucleotide probe can be determined in silico using methods known in the art.

[0103] Alternatively, the ability of the polynucleotide probes to specifically detect the expression of the target gene or mRNA in a sample can be assessed by other standard methods (see, for example, Ausubel et al., (1997 & updates) Current Protocols in Molecular Biology, Wiley & Sons, New York), including hybridization techniques such as Southern or Northern blotting using appropriate controls, and may include one or more additional steps, such as reverse transcription, transcription, PCR, RT-PCR and the like. The testing of the specificity of the polynucleotide probes of the HCP combination using these methods is well within the abilities of a worker skilled in the art.

### 1.3 Hematological Cancer Profiling (HCP) Combination

[0104] An HCP combination comprises a plurality of polynucleotide probes designed to target genes of one or more HCP set, as described above. The HCP combination can be tailored by selection of polynucleotide probes that correspond to those HCP sets that represent a hematological cancer and/or a feature(s) of interest in a hematological cancer. Thus, for example, if one is interested in investigating various features of a single hematological cancer, for example, lymphoma, one would select an HCP combination that comprised probes to the HCP set representing the lymphoma of interest. Similarly, if one is interested in investigating features of several lymphomas, then a combination would be selected that comprised probes representing several HCP sets.

[0105] In one embodiment of the present invention, an HCP combination comprises a plurality of polynucleotide probes derived from the nucleotide sequences of the genes of one HCP set. In another embodiment, an HCP combination comprises a plurality of polynucleotide probes derived from the nucleotide sequences of the genes of two or more HCP sets. In another embodiment, the HCP combination comprises a plurality of polynucleotide probes derived from the nucleotide sequences of the genes of three or more HCP sets. In a further embodiment, the HCP combination comprises a plurality of polynucleotide probes derived from the nucleotide sequences of the genes of four or more HCP sets. In other embodiments, the HCP combination comprises a plurality of polynucleotide probes derived from the nucleotide sequences of five or more HCP sets, and six or more HCP sets.

[0106] Members of an HCP set may be targeted by one or more than one polynucleotide probe of the HCP combination. Therefore, the HCP combination can comprise several polynucleotide probes targeted to only one gene in an HCP set and other probes that each target a different gene. In one embodiment, polynucleotide probes within the HCP combination each target a different member of an HCP set. In another embodiment, one or more polynucleotide probes of the HCP combination target the same member of an HCP set.

[0107] Accordingly, the HCP combination comprises between one and about 10,000 polynucleotide probes. In one embodiment of the present invention, the HCP combination comprises at least 2 polynucleotide probes. In another embodiment, the HCP combination comprises at least 5 polynucleotide probes. In other embodiments, the HCP combination comprises at least 10, 20, 30, 40, 50, 100, 150, 200 and 300 polynucleotide probes. In one embodiment, the HCP combination comprises from about 10 to about 300 polynucleotide probes. In another embodiment, the HCP combination comprises from about 20 to about 300 polynucleotide probes. In a further embodiment, the HCP combination comprises from about 30 to about 300 polynucleotide probes. In other embodiments, the HCP combination comprises from about 40 to about 300, from about 50 to about 300, from about 75 to about 300, and from about 100 to about 300 polynucleotide probes.

[0108] In an alternate embodiment, the HCP combination comprises from about 100 to about 10,000 polynucleotide probes. In a further embodiment, the HCP combination comprises from about 200 to about 5,000 polynucleotide probes. In another embodiment, the HCP combination comprises from about 200 to about 4,000 polynucleotide probes. In yet another embodiment, the HCP combination comprises from about 200 to about 3,000 polynucleotide probes. In other embodiments, the HCP combination comprises from about 200 to about 2,000, from about 300 to about 2,000, from about 400 to about 2,000, from about 500 to about 2,000, from about 500 to about 1,500, from about 750 to about 1,500, from about 750 to about 1250, and from about 800 to about 1,200 polynucleotide probes.

[0109] In a further embodiment, the HCP combination comprises from about 1,000 to about 10,000 polynucleotide probes. For example, the HCP combination can comprise from about 2,000 to about 10,000 polynucleotide probes. In one embodiment, the HCP combination comprises from about 2,500 to about 9,000 polynucleotide probes. In yet another embodiment, the HCP combination comprises from about 3,000 to about 8,000 polynucleotide probes. In other embodiments, the HCP combination comprises from about 3,000 to about 7,000, from about 3,000 to about 6,000, from about 3,500 to 6,000, from about 4,000 to about 6,000, and from about 4,000 to about 5,000 polynucleotide probes.

[0110] As indicated above, an HCP combination comprises a plurality of polynucleotide probes designed to target genes of one or more HCP set. Representative, non-limiting examples of candidate genes for inclusion in HCP sets are shown in Table 1, above. Accordingly, in one embodiment of the present invention, the HCP combination comprises between ten and 5,000 polynucleotide probes, wherein each of the probes comprise a sequence corresponding to or complementary to, the sequence of one of the genes listed in Table 1. Representative, non-limiting examples of HCP sets are provided in Tables 2-19. Thus, in another embodiment, the HCP combination comprises between ten and 5,000 polynucleotide probes, wherein each of the probes comprises a sequence corresponding to or complementary to a gene of an HCP set selected from the group of:
[0111] (a) an HCP set comprising one or more genes as set forth in Table 2;
[0112] (b) an HCP set comprising one or more genes as set forth in Table 3;
[0113] (c) an HCP set comprising one or more genes as set forth in Table 4;
[0114] (d) an HCP set comprising one or more genes as set forth in Table 5;
[0115] (e) an HCP set comprising one or more genes as set forth in Table 6;
[0116] (f) an HCP set comprising one or more genes as set forth in Table 7;
[0117] (g) an HCP set comprising one or more genes as set forth in Table 8;
[0118] (h) an HCP set comprising one or more genes as set forth in Table 9;
[0119] (i) an HCP set comprising one or more genes as set forth in Table 10;
[0120] (j) an HCP set comprising one or more genes as set forth in Table 11;
[0121] (k) an HCP set comprising one or more genes as set forth in Table 12;
[0122] (l) an HCP set comprising one or more genes as set forth in Table 13;
[0123] (m) an HCP set comprising one or more genes as set forth in Table 14;
[0124] (n) an HCP set comprising one or more genes as set forth in Table 15;
[0125] (o) an HCP set comprising one or more genes as set forth in Table 16;
[0126] (p) an HCP set comprising one or more genes as set forth in Table 17;
[0127] (q) an HCP set comprising one or more genes as set forth in Table 18;
[0128] (r) an HCP set comprising one or more genes as set forth in Table 19; and
[0129] (s) an HCP set comprising one or more genes selected from the genes set forth in Tables 2-19.

[0130] In a further embodiment, the HCP combination comprises between ten and 5,000 polynucleotide probes, wherein each of the probes comprises a sequence corresponding to or complementary to a gene of an HCP set selected from the group of:
[0131] (a) an HCP set as set forth in Table 2;
[0132] (b) an HCP set as set forth in Table 3;
[0133] (c) an HCP set as set forth in Table 4;
[0134] (d) an HCP set as set forth in Table 5;
[0135] (e) an HCP set as set forth in Table 6;
[0136] (f) an HCP set as set forth in Table 7;
[0137] (g) an HCP set as set forth in Table 8;
[0138] (h) an HCP set as set forth in Table 9;
[0139] (i) an HCP set as set forth in Table 10;
[0140] (j) an HCP set as set forth in Table 11;
[0141] (k) an HCP set as set forth in Table 12;
[0142] (l) an HCP set as set forth in Table 13;
[0143] (m) an HCP set as set forth in Table 14;
[0144] (n) an HCP set as set forth in Table 15;
[0145] (o) an HCP set as set forth in Table 16;
[0146] (p) an HCP set as set forth in Table 17;
[0147] (q) an HCP set as set forth in Table 18; and
[0148] (r) an HCP set as set forth in Table 19.

[0149] In another embodiment, the HCP combination represents more than one HCP set and comprises between about 10 and about 5,000 probes, each of said probes comprising a sequence corresponding to, or complementary to, a gene listed in any one of Tables 2-19.

[0150] In a further embodiment, the HCP combination comprises between ten and 5,000 polynucleotide probes, each of the probes having a sequence corresponding to or complementary to a nucleotide sequence selected from any one of Tables 20-23, wherein the HCP combination represents one or more HCP sets selected from the group of:
[0151] (a) an HCP set as set forth in Table 2;
[0152] (b) an HCP set as set forth in Table 3;
[0153] (c) an HCP set as set forth in Table 4;
[0154] (d) an HCP set as set forth in Table 5;
[0155] (e) an HCP set as set forth in Table 6;
[0156] (f) an HCP set as set forth in Table 7;
[0157] (g) an HCP set as set forth in Table 8;
[0158] (h) an HCP set as set forth in Table 9;
[0159] (i) an HCP set as set forth in Table 10;
[0160] (j) an HCP set as set forth in Table 11;
[0161] (k) an HCP set as set forth in Table 12;
[0162] (l) an HCP set as set forth in Table 13;
[0163] (m) an HCP set as set forth in Table 14;
[0164] (n) an HCP set as set forth in Table 15;
[0165] (o) an HCP set as set forth in Table 16;
[0166] (p) an HCP set as set forth in Table 17;
[0167] (q) an HCP set as set forth in Table 18; and
[0168] (r) an HCP set as set forth in Table 19.

[0169] Representative, non-limiting examples of suitable probe sequences targeted to the genes of the HCP sets in Tables 2-19 are provided in Tables 20-23. Accordingly, in a specific embodiment of the present invention, the HCP combination comprises at least ten polynucleotide probes, wherein each of the probes comprises at least 15 consecutive nucleotides of one of the sequences set forth in SEQ ID NOs:1-4530 (Tables 20-23). In another embodiment, the HCP combination comprises at least 20 polynucleotide probes, wherein each of the probes comprises at least 15 consecutive nucleotides of one of the sequences set forth in SEQ ID NOs:1-4530 (Tables 20-23). In another embodiment, the HCP combination comprises at least 30 polynucleotide probes, wherein each of the probes comprises at least 15 consecutive nucleotides of one of the sequences as set forth in SEQ ID NOs:1-4530 (Tables 20-23). In a further embodiment, the HCP combination comprises at least 40 polynucleotide probes, wherein each of the probes comprises at least 15 consecutive nucleotides of one of the sequences as set forth in SEQ ID NOs:1-4530 (Tables 20-23). In other embodiments, the HCP combination comprises at least 20, at least 30, at least 40, at least 50, at least 60, at least 70, at least 80, at least 90 and at least 100 polynucleotide probes, wherein each of the probes comprises at least 15 consecutive nucleotides of one of the sequences as set forth in SEQ ID NOs:1-4530 (Tables 20-23). In further embodiments, the HCP combination comprises at least 20, at least 30, at least 40, at least 50, at least 60, at least 70, at least 80, at least 90 and at least 100 polynucleotide probes, wherein each of the probes comprises at least 15 consecutive nucleotides of one of the sequences as set forth in SEQ ID NOs:1-1153 (Table 20). In other embodiments, the HCP combination comprises at least 20, at least 30, at least 40, at least 50, at least 60, at least 70, at least 80, at least 90 and at least 100 polynucleotide probes, wherein each of the probes comprises at least 15 consecutive nucleotides of one of the sequences as set forth in SEQ ID NOs:1154-2299 (Table 21). In further embodiments, the HCP combination comprises at least 20, at least 30, at least 40, at least 50, at least 60, at least 70, at least 80, at least 90 and at least 100 polynucleotide probes, wherein each of the probes comprises at least 15 consecutive nucleotides of one of the sequences as set forth in SEQ ID NOs:2300-3426 (Table 22). In further embodiments, the HCP combination comprises at least 20, at least 30, at least 40, at least 50, at least 60, at least 70, at least 80, at least 90 and at least 100 polynucleotide probes, wherein each of the probes comprises at least 15 consecutive nucleotides of one of the sequences as set forth in SEQ ID NOs:3427-4530 (Table 23).

### 1.3.1 Testing of the HCP Combination

[0170] The HCP combination can be tested for its ability to detect the expression pattern of genes in the one or more HCP sets that it represents using methods well known in the art and one or more appropriate biological samples that represent the hematological cancer and features that are to be investigated with the HCP combination. Suitable biological samples include blood or tissue samples from patients with the hematological cancer, where each sample is known to exhibit one or more feature of a particular hematological cancer. Alternatively, or in addition, biological samples can be obtained from cultures of appropriate hematological cancer cell lines, where each cell line is known to exhibit one or more feature of a particular hematological cancer. Exemplary hematological cancer cell lines that can be used for testing the HCP combination are provided in Table 24, below. One skilled in the art will appreciate that other hematological cancer cell lines are available that are also suitable for testing an HCP combination. Selection of appropriate cell lines for the testing of a particular HCP combination is within the ordinary skills of a worker in the art. If necessary one or more control samples can be used for comparison purposes, for example, a biological sample taken from a healthy subject, or a normal cell line.

[0171] The ability of the HCP combination to detect expression patterns in one or more biological samples can be determined using methods known in the art for the analysis of gene expression (see, for example, Ausubel et al., (1997 & updates) Current Protocols in Molecular Biology, Wiley & Sons, New York). Such methods are typically hybridization-based methods, such as Northern blotting. For example, RNA can be prepared from blood or tissue samples from patients or cultures of cell lines, as noted above, and separated on a gel. Probes of the HCP combination can be labelled and used to detect the expression of specific mRNAs from the sample on the gel, according to methods well known in the art. Other testing methods can include additional steps, such as reverse transcription, RT-PCR and/or PCR (including multiplex PCR). Array based methods can also be used to test an HCP combination. The expression pattern detected with the probes of the HCP combination should correspond to the expression pattern expected for each sample.

TABLE 24
Cell lines exhibiting a gene expression pattern representative of a type
of lymphoma or a type of leukemia

| | Representative |
|---|---|
| Type of Lymphoma | cell line |
| anaplastic large-cell lymphoma | Karpas 299 |
| anaplastic large-cell lymphoma | Ki-JK |
| anaplastic large-cell lymphoma | SR 786 |
| anaplastic large-cell lymphoma | SUDHL-1 |
| anaplastic large cell lymphoma | DEL |
| body-cavity lymphoma | BC-1 |
| body-cavity lymphoma | BC-2 |
| body-cavity lymphoma | BC-3 |
| body-cavity lymphoma | BCBL1 |
| Burkitt lymphoma | BL60 |
| Burkitt lymphoma | CA46 |
| Burkitt lymphoma | Namalwa |
| Burkitt lymphoma | Raji |
| Burkitt Lymphoma | Ramos |
| Burkitt lymphoma | Thomas |
| diffuse large B-cell lymphoma | HBL-2 |
| diffuse large B-cell lymphoma | KIS-1 |
| Follicular Lymphoma | FL-18 |
| Follicular Lymphoma | FL-618 |
| Hodgkin's Disease - H/RS derived cell | KMH2 |
| lines | |
| Hodgkin's lymphoma | DEV |
| Hodgkin's lymphoma | HDLM-2 |
| Hodgkin's lymphoma | L428 |
| Hodgkin's lymphoma | L540 |
| immunoblastic lymphoma line | DOHH-2 |
| lymphoblastoid cell lines | GM 03299 |
| lymphoblastoid cell lines | GM 11854 |
| mantle-cell lymphoma | Granta 519 |
| mantle-cell lymphoma | NCEB |
| Peripheral T-cell lymphoma | H9 |
| Peripheral T-cell lymphoma | yt (cytotoxic T-cell |
| | lymphoma |
| T-lymphoblastic leukemia/lymphoma | CEM |
| T-lymphoblastic leukemia/lymphoma | HSB |
| T-lymphoblastic leukemia/lymphoma | Jurkat |
| T-lymphoblastic leukemia/lymphoma | Molt-4 |
| transformed follicular lymphoma | SUDHL-10 |
| transformed follicular lymphoma | SUDHL-4 |
| transformed follicular lymphoma | SUDHL-5 |
| transformed follicular lymphoma | SUDHL-6 |
| Chronic lymphocytic leukemia | MEC-1 |
| Acute myelogenous leukemia | K-562 |

### 2. Hematological Cancer Profiling (HCP) Arrays

[0172] The present invention contemplates that the HCP combinations may be provided as an array (HCP array). In the context of the present invention, an “array” is a spatially or logically organized collection of polynucleotide probes. Typically the polynucleotide probes are attached to a solid substrate and are ordered so that the location (on the substrate) and the identity of each are known. The polynucleotide probes can be attached to one of a variety of solid substrates capable of withstanding the reagents and conditions necessary for use of the array. Examples include, but are not limited to, polymers, such as (poly)tetrafluoroethylene, (poly)vinylidenedifluoride, polystyrene, polycarbonate, polypropylene and polystyrene; ceramic; silicon; silicon dioxide; modified silicon; (fused) silica, quartz or glass; functionalized glass; paper, such as filter paper; diazotized cellulose; nitrocellulose filter; nylon membrane; and polyacrylamide gel pad. Substrates that are transparent to light are useful for arrays that will be used in an assay that involves optical detection.

[0173] Examples of array formats include membrane or filter arrays (for example, nitrocellulose, nylon arrays), plate arrays (for example, multiwell, such as a 24-, 96-, 256-, 384-, 864- or 1536-well, microtitre plate arrays), pin arrays, and bead arrays (for example, in a liquid “slurry”). Arrays on substrates such as glass or ceramic slides are often referred to as chip arrays or “chips.” Such arrays are well known in the art. In one embodiment of the present invention, the HCP array is a chip.

[0174] The HCP array can comprise a single representation of each polynucleotide probe, for example, in the form of a spot deposited on a solid surface, or the array can comprise multiple representations of the same polynucleotide probe. Currently available methods of creating chip arrays, for example, allow for the incorporation of up to about 40,000 spots on a single chip.

[0175] The HCP arrays of the present invention, therefore, can comprise as few as two spots or as many as 40,000 spots. Typically an array will comprise between about 15 and about 40,000 spots. The actual number of spots included on the array will be dependent on the number of probes in the HCP combination being used to create the array, how many times each probe is represented in the array, the number of control probes, if any, being included in the array, and the format of the array.

[0176] As is known in the art probes of varying lengths can be incorporated into the HCP arrays. In one embodiment of the invention, the probes incorporated into the array are between about 20 and about 100 nucleotides in length. In another embodiment of the present invention, the probes incorporated into the array are between about 25 and about 40 nucleotides in length. In another embodiment, the probes are between about 28 and about 32 nucleotides in length. In a further embodiment, the probes incorporated into the array are 30-mers. In alternate embodiments, the probes incorporated into the array are between about 40 and about 55 nucleotides in length, or are between about 48 and about 52 nucleotides in length. In a further embodiment, the probes incorporated into the array are 50-mers. In further embodiments, the probes incorporated into the array are between about 55 and about 65 nucleotides in length, or are between about 58 and about 62 nucleotides in length. In yet another embodiment, the probes incorporated into the array are 60-mers. In other embodiments, the probes incorporated into the array are between about 65 and about 75 nucleotides in length, or are between about 68 and about 72 nucleotides in length. In a further embodiment, the probes incorporated into the array are 70-mers.

[0177] HCP arrays can be designed in various formats, for example, in “small” or “large” format. Small arrays comprise polynucleotide probes that are generally representative of less than 500 genes. In one embodiment, the small arrays contemplated by the present invention comprise polynucleotide probes representative of between about 15 and about 499 genes. In another embodiment, a small array comprises polynucleotide probes representative of between about 50 and about 400 genes. In a further embodiment, a small array comprises polynucleotide probes representative of between about 100 and about 350 genes. In yet another embodiment, a small array comprises polynucleotide probes representative of between about 200 and about 300 genes. As indicated above, the probes representing each gene in a small array can be spotted singly or in multiplicate.

[0178] Alternatively, HCP arrays can be designed in a “large” format. Large arrays comprise polynucleotide probes that are generally representative of 500 or more genes. In one embodiment, the large arrays contemplated by the present invention comprise polynucleotide probes representative of between about 500 and about 6000 genes. In another embodiment, a large array comprises polynucleotide probes representative of between about 600 and about 4000 genes. In a further embodiment, a large array comprises comprise polynucleotide probes representative of between about 700 and about 2000 genes. In yet another embodiment, a large array comprises polynucleotide probes representative of between about 900 and about 1000 genes. In still another embodiment, the large array comprises polynucleotide probes representative of between about 1000 and about 1300 genes As for the small arrays, the probes representing each gene in a large array can be spotted singly or in multiplicate.

[0179] One skilled in the art will appreciate that as the technology for creating arrays advances, it may be possible to include larger numbers of probes in a single array. Arrays created using such technology with the HCP combinations of the present invention are considered to be within the scope of the invention.

[0180] Representative non-limiting examples of combinations of probes that can be used in the preparation of an HCP array include combinations that comprise at least 10 of the polynucleotide probes as set forth in any one of Tables, 20, 21, 22, 23, 25, 26, 27, and 28. In one embodiment of the invention, the HCP array comprises at least ten polynucleotide probes, wherein each of the probes comprises at least 15 consecutive nucleotides of one of the sequences as set forth in Table 20, 21, 22, 23, 25, 26, 27, and 28. In other embodiments, the HCP array comprises at least 20, at least 30, at least 40, at least 50, at least 60, at least 70, at least 80, at least 90 and at least 100 polynucleotide probes, wherein each of the probes comprises at least 15 consecutive nucleotides of one of the sequences as set forth in Table 20, 21, 22, 23, 25, 26, 27, and 28.

[0181] In another embodiment, the HCP array comprises at least 100 polynucleotide probes, wherein each of the probes comprises at least 15 consecutive nucleotides of one of the sequences as set forth in Table 20, 21, 22, 23, 25, 26, 27, and 28. In other embodiments, the HCP array comprises at least 200, at least 300, at least 400, at least 500, at least 600, at least 700, at least 800 and at least 900 polynucleotide probes, wherein each of the probes comprises at least 15 consecutive nucleotides of one of the sequences as set forth in Table 20, 21, 22, 23, 25, 26, 27, and 28.

[0182] In another embodiment, an HCP array comprises a combination of probes as set forth in any one of Tables 20, 21, 22, 23, 25, 26, 27, and 28.

TABLE 25

Polynucleotide probe sequences for preparation
of a small 50 mer nucleic acid array

| GenBank | |
|---|---|
| Accession | |
| Number of | |
| Target gene | Oligonucleotide sequence (5′ to 3′) |
| NM_001728 | TCGTGAGTTCCTCGCAGGGCCGGTCAGAGCTACACATTGAGAACCTGAAC |
| NM_018462 | GCTCGGGTGACAAAAGGTGAGACACTCACTAGAACAGTGCCGTGCTGCTG |
| NM_002266 | CCAGAAACTACCTCTGAAGGCTACACTTTCCAAGTTCAGGATGGGGCTCC |
| NM_004310 | GGCGACTCTGCTGTGGGGAAAACCTCTCTGTTGGTGCGCTTCACCTCCGA |
| NM_006152 | AGGACTCATGGACGTCTCTAGAACATATCTTGTGGCCATTTACCAGACTC |
| NM_012203 | CATCAGCAGGGGCGACGTCGTAAACCAGGACGACCTGTACCAGGCCTTGG |
| NM_058197 | ATTGGAATCAGGTAGCGCTTCGATTCTCCGGAAAAAGGGGAGGCTTCCTG |
| NM_000277 | CGCTACGACCCATACACCCAAAGGATTGAGGTCTTGGACAATACCCAGCA |
| NM_133480 | GCTAATTGCCCAGGGCCTTTTGGAGTCTGAGGACCGCCCCGCAGAGGACT |
| NM_002447 | AACAGCCGCAGTTCTCACCCATGCCAGGGAATGTACGCCGGCCCCGGCCA |
| NM_001197 | GGAGAACATAATGAGGTTCTGGAGATCCCCGAACCCCGGGTCCTGGGTGT |
| NM_030674 | GCCTGCTCATCGAGTAATGGTGAAGGCCACTGAAACCCGCCGAGAAAAAG |
| NM_004907 | GGGACGTTGGACTGGTCCCGAGCAAGAAAGCCCGTCTGGAAGAAAAGGAA |
| NM_002910 | TTTCAAAGGCTGCTTCCACGTGCCGCGGTGCCTAGCCATGTGCGAGGAGA |
| NM_001901 | TGGGCCTGCCCTCGCGGCTTACCGACTGGAAGACACGTTTGGCCCAGACC |
| NM_005526 | TAGAGGAGGCGAGTCCCGGGCGCCCATCTTCCGTGGACACCCTCTTGTCC |
| NM_000852 | CCTCCCCTGAGTACGTGAACCTCCCCATCAATGGCAACGGGAAACAGTGA |
| NM_002511 | GGGAGGAAGTCCTATCAAGAGAGAGGAACCAGCTACCTACTCAGCTCTTC |
| NM_000365 | TCCTTGTGGGTGGTGCTTCCCTCAAGCCCGAATTCGTGGACATCATCAAT |
| NM_001891 | CCAAGAACTTCTACTTAACCCCACCCACCAGATCTACCCTGTGACTCAGC |
| NM_006851 | TACGGACCAGGAGGGAATTACCCAACTTGGCCATATAAGAGAGGAGCCAC |
| NM_005178 | GAGTGCCAAGAAACCGTGCAGCTCTTGCTAGAGCGCGGTGCCGACATCGA |
| NM_005582 | GCAAACCCGCCATCTCTAAGGGGAGTTAAGCTATCTGATGTCAAGCTTTC |
| NM_001344 | TGGGGAGTTTCATCCTAGCGGTTTGCCTGAGAATACAGATCAACCCACAG |
| NM_002086 | TTTCTTATCCGAGAGAGTGAGAGCGCTCCTGGGGACTTCTCCCTCTCTGT |
| NM_002228 | TCCTCCCGTCCGAGAGCGGACCTTATGGCTACAGTAACCCCAAGATCCTG |
| NM_002961 | GTAACGAATTCTTTGAAGGCTTCCCAGATAAGCAGCCCAGGAAGAAATGA |
| NM_002987 | GGGGCTTCTCTGCAGCACATCCACGCAGCTCGAGGGACCAATGTGGGCCG |
| NM_182908 | ACGTCAACGGGGAGAACATTGCGGTGGCAGGCTACTCCACTCGGCTCTGA |
| NM_004434 | TACCCCTGCTCGCAGTTCAGGGCTCCAAGCCACATCTACGGCGGGCACAG |
| NM_002444 | CATGCTGAGAACATGCGACTGGGCCGAGACAAATACAAGACCCTGCGCCA |
| NM_002048 | TACGATGAGGACTACGATGACGAGCAGCGCACCGGGGGCGCGGGTGGTGA |
| BM_722299 | CCTGCTCTCGCACCGTCCGAGCGGAGCTTTCGTTTTCAGTGAGCCAGGTG |
| NM_004289 | GCCAGTCAATCCCAACCACTATGCTCTCCAGTGTACCCATGATGGAAGTA |
| NM_004665 | AGGTGCTGAAAGATGGGCGTTTGGTAAACAAGAATGGATCATCTGGGCCT |
| NM_001715 | TCCTCCTGATGGAAGTTGTCACTTATGGGCGGGTGCCATACCCAGGGATG |
| NM_001783 | AACGAGTCATACCAGCAGTCCTGCGGCACCTACCTCCGCGTGCGCCAGCC |
| NM_001618 | GGTGTAGACGTTCCTCTTGGGACCGGGATTTCATCTGGTGTGATAGACAC |
| NM_002167 | CAGACAGCCGAGCTCGCTCCGGAACTTGTCATCTCCAACGACAAAAGGAG |
| NM_006115 | CCAGCTTACAACCTTAAGCTTCTACGGGAATTCCATCTCCATATCTGCCT |
| NM_015055 | AGCCCTCCACCACACAAAGAAGCCCGCCAGCGTCGGAAAGAACTCCGGAA |
| NM_000038 | CAGGGCCAGTGCAGCACTCCACAACATCATTCACTCACAGCCTGATGACA |
| NM_020992 | AAGTGTTAAAGCTCCTGTCACTAAAGTGGCTGCGTCGATTGGAAATGCTC |
| NM_002661 | AGAAGATATGTTCAGCGATCCCAACTTTCTTGCTCATGCCACTTACCCCA |
| NM_002838 | CACACCACAGCTCTGCTGCCTTACCTGCACGCACCTCCAACACCACCATC |
| NM_005215 | CCAACAGAGGATTCAGCCAATGTGTATGAACAGGATGATCTGAGTGAACA |
| NM_022743 | TGAGACTGGCTTTTGATATTATGAGAGTGACACATGGCAGAGAACACAGC |
| NM_004119 | AGATGGATTTGGGGCTACTCTCTCCGCAGGCTCAGGTCGAAGATTCGTAG |
| NM_024408 | CAGGACGGGCAGGTAGCTCAGACCATTCTCCCAGCCTATCATCCTTTCCC |
| NM_000314 | GGAAGTCTATGTGATCAAGAAATCGATAGCATTTGCAGTATAGAGCGTGC |
| NM_001795 | ACGTGGATTACGACTTCCTTAACGACTGGGGACCCAGGTTTAAGATGCTG |
| NM_001226 | GAGACAATCTTACCCGCAGGTTTTCAGATCTAGGATTTGAAGTGAAATGC |
| NM_006763 | TTGGGGAGGACGGCTCCATCTGCGTCTTGTACGAGGAGGCCCCACTGGCC |
| NM_053056 | AACAAACAGATCATCCGCAAACACGCGCAGACCTTCGTTGCCCTCTGTGC |
| NM_004126 | GGGAATTCCAGAAGACAAGAACCCCTTTAAAGAAAAAGGCAGCTGTGTTA |
| NM_006579 | GGGCCACCCTCTCTACTTCTGGTTTTACTTTGTCTTCATGAATGCCCTGT |
| NM_007360 | TGAGAGCCAGGCTTCTTGTATGTCTCAAAATGCCAGCCTTCTGAAAGTAT |
| NM_030956 | TGCTAGGTCAATGCACACAAACATGGCACAGGGTTAGGAAAACAACCCAA |
| NM_003254 | GGGTTCCAAGCCTTAGGGGATGCCGCTGACATCCGGTTCGTCTACACCCC |
| NM_001760 | ACCCGCCATCCATGATCGCCACGGGCAGCATTGGGGCTGCAGTGCAAGGC |
| NM_005225 | TTTCAGATCTCCCTTAAGAGCAAACAAGGCCCGATCGATGTTTTCCTGTG |
| NM_003810 | TAGACATGGACCATGAAGCCAGTTTTTTCGGGGCCTTTTTAGTTGGCTAA |
| NM_006325 | GCACAGTATGAGCACGACTTAGAGGTTGCTCAGACAACTGCTCTCCCGGA |
| NM_004225 | GAAGATCAAAGACAACCCACTGATCCAGCCCCCCTACGAGGTCTGCATGA |
| NM_005781 | AGCTCTTCGGGCTGGGTCTGCGGCCCAGAGGGGAGTGCCACAAAGTGCTG |
| NM_002648 | CTGTATGATATGGTGTGTGGAGATATTCCTTTCGAGCATGACGAAGAGAT |
| NM_006769 | GAATCGCCTGGTCCCGGGAGATCGGTTTCACTACATCAATGGCAGTTTAT |
| NM_004689 | GCTGGCCGGGCCTGCGAGAGCTGTTACACCACACAGTCTTACCAGTGGTA |
| NM_003403 | CCCTCATAAAGGCTGCACAAAGATGTTCAGGGATAACTCGGCCATGAGAA |
| NM_002592 | AACGGTGACACTCAGTATGTCTGCAGATGTACCCCTTGTTGTAGAGTATA |
| NM_005104 | TCCTCTGCACAGCAAGTAGCAGTGTCACGCCTTAGCGCTTCCAGCTCCAG |
| NM_004762 | ATCAGCAGGGACCCTTTCTACGAAATGCTCGCAGCACGGAAAAAGAAGGT |
| NM_004475 | CTGTGCATGCCCTCACAGGCGTGGACCTGTCTAAGATACCCCTGATCAAG |
| NM_134269 | TCTACCGCTGTCTGGTCCAGAAGGGGCTGGTAAAAACCAAAAAGTCCTAA |
| NM_017935 | CAAGACAGAGCTCGGATAGAGAGTCCAGCCTTTTCTACTCTCAGGGGCTG |
| NM_002129 | GCTATGACAGGGAGATGAAAAATTACGTTCCTCCCAAAGGTGATAAGAAG |
| MM_001469 | AAAGACTGGGCTCCTTGGTGGATGAGTTTAAGGAGCTTGTTTACCCACCA |
| MM_006819 | GCTACCAGCGCTGTATGATGGCGCAGTACAACCGGCACGACAGCCCCGAA |
| NM_004941 | ATGAGGAACCCAATGCCTGGAGAATATCTCGAGCTTTCCGACGGCGCTGA |
| NM_003352 | CTCTTTGAGGGTCAGAGAATTGCTGATAATCATACTCCAAAAGAACTGGG |
| NM_000626 | GCTTCACGGTGAAAATGCACTGCTACATGAACAGCGCCTCCGGCAATGTG |
| NM_001237 | CTACCTCAAAGCACCACAGCATGCACAACAGTCAATAAGAGAAAAGTACA |
| BC011857 | TCCTGAGCCTCTTCTACAGTACCACCGTCACCTTGTTCAAGGTGAAATGA |
| NM_002466 | TACTCCATGGACAACACTCCCCACACGCCAACCCCGTTCAAGAACGCCCT |
| NM_000424 | CCAGTCAAGTGTGTCCTTCCGGAGCGGGGGCAGTCGTAGCTTCAGCACCG |
| AB037771 | GCCAACCAGAACTAGACTCTATTTCTACCTGTCCAAATGAGACAGTTTCA |
| NM_025113 | AGCCCATTTTCAATTTGCTGAGCATCGGCCAAAGCCTGTATGCGAAAGCC |
| NM_032873 | ACCAATCCTTCCTCTTACCCATGGACCAACTGGGGGCTTCAACTGGAGAG |
| NM_023037 | TCCTCACTACTTTTCTTCCAGACTCCAGTGTTTCTGGCACTAGTCTCTGA |
| NM_033306 | TTGACCATCTGCCTCCGAGGAATGGAGCTGACTTTGACATCACAGGGATG |
| NM_003217 | CGTCCTTGTTGATACTCAACTCATTATTGAAAAGGCCGAACATGGAGATC |
| AF509494 | AAGAAGAAAGGCGACAGCAACTTCGTAGGAAGGTAGTTGAAATTCTTCCA |
| NM_001781 | CACATTCTCAATGCCATCAGACAGCCATGTTTCTTCATGCTCTGAGGACT |
| NM_002984 | CAGCCAGCTGTGGTATTCCAAACCAAAAGAAGCAAGCAAGTCTGTGCTGA |
| BC025340 | CGCAGCATGGAGTCTGCTCTCAGCTGTTGGGGAATTACCGATGCCTTTGA |
| NM_030926 | CCCCTCGCAACTTCTGGGAGCTCCTCATGAACGTGAAGAGGGGGACCTAC |
| AF331856 | GGTATTTGGTTTCCCAGTCCACTATACTGACGTCTCCAACATGAGCCGCT |
| NM_000405 | GAAAAAGCCATCCCAGCTCAGTAGCTTTTCCTGGGATAACTGTGATGAAG |
| NM_000483 | CCGCTGTAGATGAGAAACTCAGGGACTTGTACAGCAAAAGCACAGCAGCC |
| NM_001888 | CAGCCCACTGTGAGAAGACCACGGTGTTCAAGTCTTTGGGAATGGCAGTG |
| NM_014670 | GTCTGAGCTGACTCTGTTACTGAAGATTCAGGAGTATTGCTATGACAACA |
| NM_003804 | AGCTATCTTTGATAATACCACTAGTCTGACGGATAAACACCTGGACCCAA |
| AB018263 | TCAGGACCACCCTGCTGCTTAACTCCACGCTCACTGCCTCGGAGGTCTGA |
| NM_006475 | GCAGTCTTCAGCCTATTATCAAAACTGAAGGACCCACACTAACAAAAGTC |
| NM_001786 | AATCCTACAGGGGATTGTGTTTTGTCACTCTAGAAGAGTTCTTCACAGAG |
| NM_031942 | CGGCAGCGAGATGGACGGTGTGCGACTGGGGTCCTTGTGTATTTAGCCAA |
| NM_001640 | CGCATGGAGAACATTCGATTCTGCCGCCAATACCTGGTGTTCCATGACGG |
| NM_002483 | GTGCTCCTGTCCTCTCAGCTGTGGCCACCGTCGGCATCACGATTGGAGTG |
| NM_003915 | CACACCCATCCAGGTGCAATGCTCCGATTATGACAGTGACGGGTCACATG |
| NM_147180 | CCACAATGGGAAACGAGGCCAGTTACCCGGCGGAGATGTGCTCCCACTTT |
| NM_000485 | TATTCAGGGACATCTCGCCCGTCCTGAAGGACCCCGCCTCCTTCCGCGCC |
| NM_004924 | AACCCCTACACCACCGTCACCCCGCAAATCATCAACTCCAAGTGGGAGAA |
| NM_003480 | CTGCCCCCTAGGAGACTCCGTCGCTCCAATTACTTCCGACTTCCTCCCTG |
| NM_002023 | CAACAATGTCTACACCGTCCCCGATAGCTACTTCCGGGGGGCGCCCAAGC |
| NM_006216 | GCCGCTGAAAGTTCTTGGCATTACTGACATGTTTGATTCATCAAAGGCAA |
| NM_003651 | GCAGGTGAAGCACCAACTGAGAACCCTGCTCCACCCACCCAGCAGAGCAG |
| NM_006565 | GAGAGGACGACCCCCTGGCAGAACCAACCAGCCCAAACAGAACCAGCCAA |
| NM_030666 | CTTTTCTTTATTCGGCATAATTCCTCAGGTAGCATCCTATTCTTGGGGAG |
| NM_005537 | GGGGTGGAGGGTGGACGAGTTGATTTGAACGTCTTCGGGTCGCTCGGCCT |
| NM_004235 | CGTGGCCCCGGAAAAGGACCGCCACCCACACTTGTGATTACGCGGGCTGC |
| NM_016269 | CTATCAACCAGATTCTTGGCAGAAGGTGGCATGCCCTCTCCCGTGAAGAG |
| NM_006164 | TCAGCACCTTATATCTCGAAGTTTTCAGCATGCTACGTGATGAAGATGGA |
| NM_004630 | TCCTCACCCAACTCCCTTTGCCTCTCCCCAAACCGGGCCGCCAGGATCCC |
| NM_003222 | CGAACATACAGAACTGCTTGTCTCATTTCAGCCTGATTACCCACGGGTTT |
| NM_000700 | GCCATAAGGCATTGATCAGGATTATGGTTTCCCGTTCTGAAATTGACATG |
| NM_019846 | GGGCACATCAGGGGAAACACGAAACATACGGCCATAAAACTCCTTATTAG |
| NM_006889 | CCTGAAAGATCTGATGAAGCCCAGCGTGTTTTTAAAAGTTCGAAGACATC |
| NM_032738 | CAGAAACAGCATCTGTTGTGGCTATCACAGTCCAAGAACTGTTTCCAGCG |
| NM_000417 | TTATTATCAGTGCGTCCAGGGATACAGGGCTCTACACAGAGGTCCTGCTG |
| BC019046 | TCACCATCTTCATCACACTCTTCCTGTTAAGCGTGTGCTACAGTGCCACC |
| NM_002189 | GAGCGCTGTGTCTCTCCTGGCATGCTACCTCAAGTCAAGGCAAACTCCCC |
| NM_004827 | AGGGCATCGATCTCTCACCCTGGGGCTTGTGGAAGAATCACGTGGCCTTG |
| NM_001647 | ATCAAATCGAAGGTGAAGCCACCCCAGTTAACCTCACAGAGCCTGCCAAG |
| NM_014257 | AGACCAGTCCAAGCAGCAGCAAATCTATCAAGAACTGACCGATTTGAAGA |
| NM_001830 | TTGCCCAGAGGAGGGAACTGATTCTCGCAATAAATAACGCCAGACAGAGG |
| NM_020944 | CAAACAGGGCACAGGACTAAGGACAGGGCCTATGTTTGGACCAAAGGAAG |
| NM_021643 | CATCCTTGGTTTTCTACAGATTTTAGCGTCTCGAATTCAGCATATGGTGC |
| NM_017784 | AGGAACGGAAGCGCGAGAACCTCCGCACACCATGGAAGCCCAAATATTTT |
| NM_022366 | GCGTTCCAAAGATTGTGCTTATAAATGGCTGTATGATGAAACCCTGGAAG |
| NM_002933 | TGTGGCCTGTGAAGGGAGCCCATATGTGCCAGTCCACTTTGATGCTTCTG |
| NM_022829 | CCTTCCCGGACTGGGCTGATATGTACTCGGTCAATGTCACAGCATTGCCA |
| NM_003339 | AGATGATCCTTTAGTGCCTGAGATTGCTCGGATCTACAAAACAGATAGAG |
| NM_005277 | AATCTCTGCTTGGACCTTCGTCAGTTTGGAATTGTGACAATTGGAGAGGA |
| NM_006820 | CAAAGCCGGGTCATGAATGTCCATAAAATGCTAGGCATTCCTATTTCCAA |
| NM_024728 | CCCATGGCCCCTTCCTTCATCTTCAAGGATCAGCAAGGGTATTACACAAT |
| NM_025263 | GCTTTCACAAGGAACAGAGAAACCCTCGAAGGCTCAAAAGCTGGTCTCTT |
| BC046632 | AGCAGTGCCGGTGCATGTCCGTGAACCTGAGCGACTCGGACAAGCAGTGA |
| NM_000877 | TGGTCAGGGGACTTTACACAGGGACCACAGTCTGCAAAGACAAGGTTCTG |
| NM_014365 | TTGACAGCCTCTTGGCCCGACTGGGCTCTGCCTCGTCTCTCCTCCGCCTG |
| AK092000 | ATCGAGCATGCTATTCCAGTGTACTGAACATACTGTATACCTCGTGTTAG |
| NM_022436 | GCTCAAATGTTTCTGTGACAACTAATCCAATGTGTGCCTTCACTCAAGGA |
| NM_001165 | CAACATTTGACTTGTGTAATTCCAATCCTGGATAGTCTACTAACTGCCGG |
| BX647445 | ACTGTTGCCCTGGCTGTATTCATAAGATTCCAGCTCCTTCAGGTGTTTGA |
| BC022095 | CATGCGCACGGGGTTCCTAGCTCCCACGTCTATGTTCACATTTGTGGTCC |
| NM_031305 | CAGACTGTCCACCTATGATAATGTCCATCAACAGTTCTCCATGATGAACC |
| NM_006191 | CCAATGGCCCCATGCGGATAACCAGTGGTCCCTTCGAGCCTGACCTCTAC |
| NM_014792 | CCGGTGAGCTTGTGGTGTGGGTTTTCAGGCTGTATCCTTCTACCTCCTGA |
| NM_014686 | TGTGAACCAGGATAACAAAACCAAAACGTGGCCACCCAAAGCACCCTGGC |
| AB029034 | CAGGCAAACCGCAGCACCACACCTATGGCCCCCGGTGTCTTCTTGACCCA |
| BQ722784 | ATCGGTCTTTCTCTTTCAATCCTCACCCGGGATATTTGACCCCTTCCATG |
| NM_198243 | CTGTGTGCACGGATGTTATATAATTACGGAGCAGACACGAACACACGGAA |
| NM_016570 | GCACATGCCATTCTGGCAGTTTTTTGTAAGACTCTGTGGTATTGTTGGAG |
| BC001077 | CCACTGCCCTCTAAGACCTTGGAAGGGGAAACACCAGAAGGTGTGGGTGC |
| NM_138379 | ACATTGGAGATAGTAAAAATGTCCTCAATGACGTGCAGCATGGAAGGGAA |
| NM_024319 | ATGTTCGGCTCCAGTCGTGGAGGCGTGCGCGGCGGGCAGGACCAGTTCAA |
| AB032991 | GGAAGGTATGGTGCTATCTGCGGATTTGGCCTTTCCTTGATCAAATGGAT |
| NM_015670 | CCTATTTTGACTCGCAGCGTACCCTAAACCGCCGCTGCCCTAAGCATATT |
| NM_015436 | CCTTGCTGTGACAAGCTTTATACTTGCCGCTTGTGTCATGATAACAATGA |
| NM_032263 | AAGATTCGGCCACTTACAACAGTCTCCTGCAAGCTTTGAGCAAAGAGAGG |
| NM_021960 | AAGGACAAAACGGGACTGGCTAGTTAAACAAAGAGGCTGGGATGGGTTTG |
| NM_000295 | TGACCACCGTGAAGGTCCCTATGATGAAGCGTTTAGGCATGTTTAACATC |
| NM_002390 | ACCCACGGGGGAGACGGAGAGATATAAAGGTCCCAGCGGCACCAACATCA |
| NM_001706 | CTTCCGCTACAAGGGCAACCTCGCCAGCCACAAGACCGTCCATACCGGTG |
| NM_005214 | TGCAGCAGTTAGTTCGGGGTTGTTTTTTTATAGCTTTCTCCTCACAGCTG |
| NM_006850 | TCCGGAGAGCATTCAAACAGTTGGACGTAGAAGCAGCTCTGACCAAAGCC |
| NM_000418 | GGACAGGGAGCCACCTCGCAGTCCGCAGAGCTCACATCTCCCAAGCAGCT |
| NM_002835 | CCAACAGAAGCCACAGATATTGGTTTTGGTAATCGATGTGGAAAACCCAA |
| NM_002927 | CTGGATGGCATGTGAAACCTATAAGAAAATTGCCTCACGGTGGAGCAGAA |
| NM_003005 | CTAGGAACATATGGAGTTTTTACAAACGCTGCATTTGACCCGAGTCCTTA |
| NM_005449 | TCCAGATGCCTGCATATGCCAGTTCTTCCAAATTCGTAACCAGAGTTACC |
| NM_000075 | CAGAGGATGACTGGCCTCGAGATGTATCCCTGCCCCGTGGAGCCTTTCCC |
| NM_004064 | AATAAGGAAGCGACCTGCAACCGACGATTCTTCTACTCAAAACAAAAGAG |
| NM_004454 | GGAGGACACCCTGCCGCTGACCCACTTTGAAGACAGCCCCGCTTACCTCC |
| NM_001775 | GCCAGGATCCCACCATAAAAGAGCTGGAATCGATTATAAGCAAAAGGAAT |
| NM_176783 | ACTCAAATCTCTAAGTATTTCTCTGAGCGTGGTGATGCAGTGACTAAAGC |
| NM_016187 | TTGTACTTCCCCCACCTTAATGACATCTCAGGTTGCTTCAGAGCCTGGAG |
| NM_006495 | GGAGTTCTCTATTCCTCCCAACTCTGATCAAGATCTTAATGAATCCCTGC |
| NM_042066 | CTCCATCAAGAGAGCTACTGAAGCATCCAGTCTTTCGTACTACATGGTAG |
| NM_005248 | CAGCATCCCTGTACGAGGCCATGGAACAGACCTGGCGTCTGGACCCGGAG |
| NM_032663 | AAAGAAGCGTAGAAAAGGGCTTGTGCCTGGCCTTGTTAATTTAGGGAACA |
| NM_000633 | CCCTGGTGGGAGCTTGCATCACCCTGGGTGCCTATCTGGGCCACAAGTGA |
| NM_005100 | AATGGCCAGAAAGGAGCCCTGAACGGTCAAGGAGCCCTAAACAGCCAGGA |
| NM_014207 | CATCGCAACCACACGGCAACCGTCCGATCCCATGCTGAGAACCCCACAGC |
| NM_001831 | TGACTCTGATCCCATCACTGTGACGGTCCCTGTAGAAGTCTCCAGGAAGA |
| NM_006187 | ACAGAGCTACAACGGGACTTCATCATCTCTCGCCCTACCAAGCTGAAGAG |
| NM_058176 | GCCTGTGGCCAAAGAGTTTGATCCAGACATGGTCTTAGTATCTGCTGGAT |
| NM_002738 | GATTTTTCACCCGCCATCCACCAGTCCTAACACCTCCTGACCAGGAAGTC |
| NM_001774 | TGTGCAGAAACCTGGACCACGTCTACAACCGGCTCGCTCGATACCGTTAG |
| NM_152866 | AAGAAACAGAGACGAACTTTCCAGAACCTCCCCAAGATCAGGAATCCTCA |
| NM_006184 | GCCGAGCAGGATCCCAATGTACAGGTGGATCATCTGAATCTCCTGAAACA |
| NM_003955 | CCTATGAGAAAGTCACCCAGCTGCCGGGGCCCATTCGGGAGTTCCTGGAC |
| NM_002162 | AGAGCACCTATCTGCCCCTCACGTCTATGCAGCCGACAGAAGCAATGGGG |
| NM_000598 | AGTTCCTCAATGTGCTGAGTCCCAGGGGTGTACACATTCCCAACTGTGAC |
| NM_006472 | CCTGAGTTCAAGTTCATGCCACCACCGACTTATACTGAGGTGGATCCCTG |
| NM_005998 | CTGTGAGACCTGGGGTGTAAATGGTGAGACGGGTACTTTGGTGGACATGA |
| NM_000884 | TGGAAGGTGGCGTCCATAGCCTCCATTCGTATGAGAAGCGGCTTTTCTGA |
| NM_006636 | CTGCAAAAAAGGTGCTGAGGCTTGAAGAGCGAGAAGTGCTGAAGTCTAAA |
| NM_000269 | AAGGACCGTCCATTCTTTGCCGGCCTGGTGAAATACATGCACTCAGGGCC |
| NM_004619 | GCCAAGAACGCCTACATTAAAGATGACACTCTGTTCTTGAAAGTGGCCGT |
| NM_004972 | GGGATCTAGCTCTTCGAGTGGATCAAATAAGGGATAACATGGCTGGATGA |
| NM_019841 | CTGGGGCACTTGAATCTTGGACTGAACCTTAGTGAGGGGGATGGAGAGGA |
| NM_156039 | CGACTGTGTCTTTGGGCCACTGCTCAACTTCCCCCTCCTGCAGGGGATCC |
| NM_002467 | AGGAGGAACGAGCTAAAACGGAGCTTTTTTGCCCTGCGTGACCAGATCCC |
| NM_002460 | GCAATCCAGAAGATTACCACAGATCTATCCGCCATTCCTCTATTCAAGAA |
| NM_001242 | GGGCCCTGTTCCTCCATCAACGAAGGAAATATAGATCAAACAAAGGAGAA |
| NM_001877 | TAGAAGCACGAGAAGTATATTCTGTTGATCCATACAACCCAGCCAGCTGA |
| NM_004513 | TGGGTGGCACTGCCATGCAGGGCCTCACACGGTTTGAAGCCTGGAACATC |
| NM_007289 | CAGAAATGCTTTCCGCAAGGCCCTTTATGGTACAACCTCAGAAACAGCAA |
| NM_018209 | GCCCCTCGGAGGGCCACAGTTATCAGAACAGCGGTCTGGACCACTTCCAA |
| NM_002166 | TTGGACCTGCAGATCGCCCTGGACTCGCATCCCACTATTGTCAGCCTGCA |
| NM_001882 | GAAAACCCAAATGGAAACAGTATCGGGGAATTCTGTTTGTCTGGTCTTTG |
| NM_000698 | ACGGTCACCGTGGCCACTGGCAGCCAGTGGTTCGCCGGCACTGACGACTA |
| NM_001923 | GCAAACCTACAGTATGACGATGGCAGCGGTATGAAGCGAGAGGCCACTGC |
| NM_031966 | ATGCCACATCGAAGCATGCTAAGATCAGCACTCTACCACAGCTGAATTCT |
| NM_001987 | AAAATATTCCGGATAGTGGATCCCAACGGACTGGCTCGACTGTGGGGAAA |
| NM_002574 | CTGTTGGCCGCTCTGTGGATGAGACTTTGAGACTAGTTCAGGCCTTCCAG |
| NM_000034 | TCCCTTCCCCCAAGTTATCAAATCCAAGGGCGGTGTTGTGGGCATCAAGG |
| NM_003656 | AGATACAGCTCTAGATAAGAATATCCACCAGTCGGTGAGTGAGCAGATCA |
| NM_002168 | CCGCGGCGCCACTATGCCGACAAAAGGATCAAGGTGGCGAAGCCCGTGGT |
| NM_005566 | CGGAATAAAGGATGATGTCTTCCTTAGTGTTCCTTGCATTTTGGGACAGA |
| NM_003070 | GCGGAGGGAAGATGCCCGGAACCCGAAACGGAAGCCCCGTTTAATGGAGG |
| NM_007146 | AATGAGACCTGTAGAGAGCATGCCTTTCTTGCCCCAAGCTTTGCCTACAT |

TABLE 26

Polynucleotide probe sequences for
preparation of a small 30mer
nucleic acid array

| GenBank | |
|---|---|
| Accession No. of | Oligonucleotide |
| Target gene | sequence (5′ to 3′) |
| NM_001728 | AAGAACGTCCGCCAGAGGAACTCTTCCTGA |
| NM_018462 | GACACTCACTAGAACAGTGCCGTGCTGCTG |
| NM_002266 | TACACTTTCCAAGTTCAGGATGGGGCTCCT |
| NM_004310 | AGGAGACGAAACAGAAGGAGGCTCTTCTCC |
| NM_006152 | CTCCGACACAATGGGCCACCACCAGTGTGA |
| NM_012203 | AGGGGAGCCGATGCCTAGTGAACTCAAGCT |
| NM_058197 | GGAGTTTTCAGAAGGGGTTTGTAATCACAG |
| NM_000277 | CCAGCAGCTTAAGATTTTGGCTGATTCCAT |
| NM_133480 | CACTTAGTGCCCACAACCGCACCAAGAAGC |
| NM_002447 | TCTCACCCATGCCAGGGAATGTACGCCGGC |
| NM_001197 | TGAGGTTCTGGAGATCCCCGAACCCCGGGT |
| NM_030674 | CACACATCAGCAATCTCTCACCACTTCTTT |
| NM_004907 | AGCGTCATCCGAAGTCGCCGATCGCCTGCA |
| NM_002910 | AAAGGCTGCTTCCACGTGCCGCGGTGCCTA |
| NM_001901 | AATCGCTGTACTACAGGAAGATGTACGGAG |
| NM_005526 | CCCAAAGCCAAGGACCCCACTGTCTCCTAG |
| NM_000852 | CTCCCCATCAATGGCAACGGGAAACAGTGA |
| NM_002511 | CACAGCATGAAGCAGGAAATGGCAATGTGA |
| NM_000365 | CTCAAGCCCGAATTCGTGGACATCATCAAT |
| NM_001891 | CCACCCACCAGATCTACCCTGTGACTCAGC |
| NM_006851 | CCACGTAACAGATACACTTCTCTCTTTCTC |
| NM_005178 | TCAGCTCCAATGGTCTTCTCTCCGCATCAC |
| NM_005582 | CTGTGGGATTACAGCCATAGGCATTTTCTT |
| NM_001344 | GTTTGCCTGAGAATACAGATCAACCCACAG |
| NM_002086 | CCGAGAGAGTGAGAGCGCTCCTGGGGACTT |
| NM_002228 | TGATAATCCAGTCCAGCAACGGGCACATCA |
| NM_002961 | CTTTGAAGGCTTCCCAGATAAGCAGCCCAG |
| NM_002987 | TGCTCCAGGGATGCCATCGTTTTTGTAACT |
| NM_182908 | TTGCGGTGGCAGGCTACTCCACTCGGCTCT |
| NM_004434 | ACAAGCATCATGCAGTGGCGCGTCATTTAG |
| NM_013451 | CAGCCCAACATTTCCAGATACTACCTGCGT |
| NM_002444 | ATGACATGATCCATGCTGAGAACATGCGAC |
| NM_002048 | TGAGGACTACGATGACGAGCAGCGCACCGG |
| BM722299 | GTGGTTCACAACGACAGGCTACTGAGCACC |
| AB033114 | TAGGAGAAGCACTGTTGTTTTCCACACAGT |
| NM_004665 | GACCAGCAATTCAGCAATAACTTACCTGCT |
| NM_001715 | GATGAGCAACCCCGAGGTCATCCGCAACCT |
| NM_001783 | AGGAGGGCAACGAGTCATACCAGCAGTCCT |
| NM_001618 | GACCGGGATTTCATCTGGTGTGATAGACAC |
| NM_002167 | CGGAACTTGTCATCTCCAACGACAAAAGGA |
| NM_006115 | GTGGGGACAGAACCTTCTATGACCCGGAGC |
| NM_015055 | ACCCTCACCTGATCACTAACTGGGGACCTG |
| NM_000038 | AGAGAGGCAGGCGTGAAATCCGAGTCCTTC |
| NM_020992 | TATGAAGTGGTCACTGTGTTCCCCAAGTGA |
| NM_005933 | ACTGGGGCAAGAACGGAGTTGCTTCTATAA |
| NM_002661 | CAGTGTTAATGAGAACCACTCCAGCTGTAC |
| NM_002838 | CACCATCACAGCGAACACCTCAGATGCCTA |
| NM_005215 | CCAATGTGTATGAACAGGATGATCTGAGTG |
| NM_022743 | GAATGCGACGCCAACATCAGAGCATCCTAA |
| NM_004119 | TCTCCGCAGGCTCAGGTCGAAGATTCGTAG |
| NM_024408 | CACATGTCTGAGCCACCACACAACAACATG |
| NM_000314 | CCACTGACTCTGATCCAGAGAATGAACCTT |
| NM_001795 | GACTGGGGACCCAGGTTTAAGATGCTGGCT |
| NM_001226 | CGCAGGTTTTCAGATCTAGGATTTGAAGTG |
| NM_006763 | AAGAACTACGTGATGGCAGTCTCCAGCTAG |
| NM_053056 | TGATCAAGTGTGACCCAGACTGCCTCCGGG |
| NM_004126 | AGCTTCGCAAAGAAGTGAAGTTGCAGAGAC |
| NM_006579 | ATGCTGTGAAGCACCTCACTCATGCCCAGA |
| NM_007360 | GTGCACTCTATGCCTCGAGCTTTAAAGGCT |
| NM_030956 | GAGGTTCTACAATCTCTCTGATGAGAACAG |
| NM_003254 | AACTGCAGAGTGGCACTCATTGCTTGTGGA |
| NM_001760 | CCTACAGATGTCACAGCCATACACCTGTAG |
| NM_005225 | CTCATCCCTCACCACAGATCCCAGCCAGTC |
| NM_003810 | CAGTTTTTTCGGGGCCTTTTTAGTTGGCTA |
| NM_006325 | AGAGGTTGCTCAGACAACTGCTCTCCCGGA |
| NM_004225 | ACCCACTGATCCAGCCCCCCTACGAGGTCT |
| NM_005781 | AAGTGCTGGAGATGTTCGACTGGAACCTGG |
| NM_005243 | AGTACTCAGCCGGCAGCATAATGAAAAGTG |
| NM_002648 | GATAGGCCAACCTTCGAAGAAATCCAGAAC |
| NM_006769 | TGAATTCACTTCAGAGCAATCCACTACTGC |
| NM_004689 | AACCGCAGTAACATGAGTCCCCACGGCCTC |
| NM_003403 | AACATCTGCACACCCACGGTCCCAGAGTCC |
| NM_002592 | TACTTGGCTCCCAAGATCGAGGATGAAGAA |
| NM_005104 | TCAGACACCAGTGATTCAGACTCAGGCTAA |
| NM_004762 | AAGAAGGTCTCCTCCACGAAGCGACACTGA |
| NM_004475 | ATCAAGAAGGCCACTGGTGTGCAGGTGTGA |
| NM_013995 | GTGCTGGTCTTTCAGGCTTGATTATCGTTA |
| NM_134269 | GAAGGGGCTGGTAAAAACCAAAAAGTCCTA |
| NM_017935 | CGACCCCAAGTTGAAAAGGAATTTGGTTTC |
| NM_002129 | GCTGCATATCGTGCCAAGGGCAAAAGTGAA |
| NM_181430 | GCCAGCTCAGACTGGAGTTGCCTCAGTTGA |
| NM_031844 | AGGTAAGAAGAAGGCGGAAGGCGGCGGAGG |
| NM_006819 | ATGGATGTGGGTCTGATTGCAATTCGGTGA |
| NM_004941 | AGAATATCTCGAGCTTTCCGACGGCGCTGA |
| NM_003352 | GAACAAACGGGGGGTCATTCAACAGTTTAG |
| NM_000626 | ACAGAGCTGCGAGTCATGGGATTCAGCACC |
| NM_001237 | AAGTATCATGGTGTTTCTCTCCTCAACCCA |
| BC011857 | TCCCGACGGTGGGTTTGTTCTACTGGGGCC |
| NM_002466 | CACACATCTCGGACCCTCATCTTGTCCTGA |
| NM_000424 | TGGCTTCAGTGCAAGCAGTGGCCGAGGGCT |
| AB037771 | CCAAGCTCTCTTTTCCAGAGAGCAGTGGCT |
| NM_025113 | GACTGTTCAACATGCCTTATGATAACACCG |
| NM_032873 | GGACCAACTGGGGGCTTCAACTGGAGAGAG |
| NM_023037 | GACTCCAGTGTTTCTGGCACTAGTCTCTGA |
| NM_033306 | GGCTCTATCTTCATCACACAACTCATCACA |
| NM_003217 | GGCTTCGTCCTTGTTGATACTCAACTCATT |
| AF509494 | CTTGAGTAAGACAAGTCTGGTGAACGAATG |
| NM_001781 | ACAACTGGTTCAACGTTACAGGGTCTGACA |
| NM_002984 | GAGTACGTGTATGACCTGGAACTGAACTGA |
| BC025340 | CAGCTGTTGGGGAATTACCGATGCCTTTGA |
| NM_030926 | GCTCCTCATGAACGTGAAGAGGGGGACCTA |
| AF331856 | ACTATACTGACGTCTCCAACATGAGCCGCT |
| NM_000405 | AAGATCGCTGCCTCTCTAAAGGGCATATAG |
| NM_000483 | AGGGACTTGTACAGCAAAAGCACAGCAGCC |
| NM_001888 | CAAACTCATCTATGATTCCTGGTCATCTGG |
| NM_014670 | TTGCTGCCTTTACTACTCAAGGTCAGTCTG |
| NM_003804 | AGCAGCTTGATTTACGTCAGCCAGAACTAA |
| AB018263 | AACTCCACGCTCACTGCCTCGGAGGTCTGA |
| NM_006475 | CAATAACTGAAGTGATCCATGGAGAGCCAA |
| NM_001786 | GGGGATTGTGTTTTGTCACTCTAGAAGAGT |
| NM_031942 | TGAGATACAAGATGGAATGAGGCTGCAGTC |
| NM_001640 | AGGGCATGGAGTATTACCGTGCCCTCAAGA |
| NM_002483 | GTGGCCACCGTCGGCATCACGATTGGAGTG |
| NM_003915 | GCTCCGATTATGACAGTGACGGGTCACATG |
| NM_018842 | CCAGTGAGAAGCTTCAGTGGAGAGGCCTAA |
| NM_147180 | TATCCTTTGAGGAATTCAGTGCTGTGGTCA |
| NM_000485 | TGGCACCTGTACCCTTCTTCTCTCTCCTGC |
| NM_004924 | ACGGCCTTGTATGGCGAGAGCGACCTGTGA |
| NM_002276 | ATCACTACAACAATTTGTCTGCCTCCAAGG |
| NM_003480 | CCTCCCTGTGAAAATGTGGATTTGCAGAGA |
| NM_002023 | CTCCAAGGCAATAGGATCAATGAGTTCTCC |
| NM_006216 | GTGTTATTCATGGGGCAGATAAACAAACCC |
| NM_001675 | AAGGCAAGGGGGAAGAAAAGGGTCCCCTAG |
| NM_021813 | TAAGTGTACAACTGACGAACAGCCCAGGAA |
| NM_006565 | GAAGACCAGAATACAGGTGCAATTGAGAAC |
| NM_030666 | GGTAGCATCCTATTCTTGGGGAGATTTTCT |
| NM_005537 | CTTTCGGGCGCGGATTTATAGCAGTAGCAG |
| NM_004235 | CCTCGCCTTACACATGAAGAGGCATTTTTA |
| NM_016269 | TGCATCAGGTACAGGTCCAAGAATGACAGC |
| NM_006164 | TTCTCCTAGTGAATACTCCCTGCAGCAAAC |
| NM_004630 | CTCTCCTCACCCAACTCCCTTTGCCTCTCC |
| NM_003222 | CCAGCTGATTCTAACAAAACCCTGGAGAAA |
| NM_000700 | GCCAAGCCATCCTGGATGAAACCAAAGGAG |
| NM_019846 | GAAACACGAAACATACGGCCATAAAACTCC |
| NM_006889 | GCCCAGCGTGTTTTTAAAAGTTCGAAGACA |
| NM_032738 | AACAGCATCTGTTGTGGCTATCACAGTCCA |
| NM_000417 | GCCCCAGCTCATATGCACAGGTGAAATGGA |
| BC019046 | TACAGGAACATGATCGGACAGGGGGCCTAG |
| NM_002189 | GACTTGGAAAACTGCTCTCACCACCTATGA |
| NM_004827 | TGGGGCTTGTGGAAGAATCACGTGGCCTTG |
| NM_001647 | TTGGCAAGAAACCCTAATCTCCCTCCAGAA |
| NM_001830 | CAGGACCCCGAATCCATCATGTTTAATTAG |
| NM_020944 | GGACAGGGCCTATGTTTGGACCAAAGGAAG |
| NM_021643 | GGAAGAGAACTTGGACCCTTTCTTTAACTG |
| NM_017784 | TGGAAGCCCAAATATTTTATCCAGGAGGGC |
| NM_022366 | CTGTATGATGAAACCCTGGAAGATAGGTAG |
| NM_002933 | CATATGTGCCAGTCCACTTTGATGCTTCTG |
| NM_022829 | TTGGCCAATGACACATTTCGGACCCTCTGA |
| NM_003339 | CCTGAGATTGCTCGGATCTACAAAACAGAT |
| NM_005277 | TCCAAAGAGCGGCTCAATGCATACACATAA |
| NM_006820 | TTCTCATCCTCTCTGCACTGAGGCAGATGC |
| NM_024728 | CATCTTCAAGGATCAGCAAGGGTATTACAC |
| NM_025263 | CATCCAGGCGTCAATGGACCTCCTCTGTGA |
| BC046632 | GTGAACCTGAGCGACTCGGACAAGCAGTGA |
| NM_024713 | CCATCTTACTTTGGTTCCAGGATATACTGG |
| NM_000877 | TTCATCTAAACACCAGTTACTGTCACCAGC |
| NM_014365 | CAGGACAGCCAGGAAGTCACCTGTACCTGA |
| AK092000 | CAGTGTACTGAACATACTGTATACCTCGTG |
| NM_022436 | CCAGCTCTTGTCATCCTAGGAATAGTTGTT |
| NM_001165 | GTGTCCTATTTGTAGGAGTACAATCAAGGG |
| BX647445 | CATAAGATTCCAGCTCCTTCAGGTGTTTGA |
| NM_001743 | ATCGATGGAGATGGCCAGGTCAATTATGAA |
| BC022095 | GTCTTGCGAGGACAGCCTCATAGAGAATGA |
| NM_031305 | CGAGAGAGGAAACACAATATGGATTCAGTG |
| NM_006191 | GAGAATCCCACCAGTGGGGAAACATTAGAA |
| NM_014792 | GTTTTCAGGCTGTATCCTTCTACCTCCTGA |
| NM_014686 | AGTGTGGGCCGCAACCAACGACTGCAGTGC |
| AB029034 | AGAGACTCGGCCGTATCCTGAAAATCCACA |
| BQ722784 | ACCCCAGATGGTGAAACGGCCCAAGCCAAA |
| NM_198243 | TAATTACGGAGCAGACACGAACACACGGAA |
| NM_016570 | CGTTTCAGACTTGGATCCTATAAACCTGTC |
| BC001077 | CGCGGTAGACGAGCGGATGCTGCGCTTTCT |
| NM_138379 | GAAGACGAAGACGGCCTTTTTACCCTCTAA |
| NM_024319 | TCTCGCAGGTGGCATGACAGAGGCTCTGAG |
| NM_005340 | CTTGGAGGTCGGCAAATGCATTGGCCTCCT |
| AB032991 | CAGAAACATGTCTGAAAGTATGGCAGCTGC |
| NM_015670 | GAGCTGTGTCACTGCAAACTCACTGTGTGA |
| NM_015436 | CAAGCTTTATACTTGCCGCTTGTGTCATGA |
| NM_032263 | GGCGAGGCACTATGATACGGAGAGAAATTG |
| NM_021960 | TAGTTAAACAAAGAGGCTGGGATGGGTTTG |
| NM_000295 | GGTCTGCCAGCTTACATTTACCCAAACTGT |
| NM_002390 | ATTCGCCGAGGAAGGTCCGGAGGGGCCTAA |
| NM_001706 | ACCAAGGTGCAATACCGCGTGTCAGCCACT |
| NM_005214 | CCTCACAGCTGTTTCTTTGAGCAAAATGCT |
| NM_006850 | GGGAAGTGGACATTCTTCTGACCTGGATGC |
| NM_000418 | CTCCGTGGGACCCACATACATGAGGGTCTC |
| XM_034274 | CCAGTAGTACTTCAAGAGCTCTCATACTGT |
| NM_002835 | CCAAGAGATCCACCTTCAGAATGGACATGA |
| NM_002927 | GGATTCCTACCCCAGATTTCTAAAGTCAGA |
| NM_003005 | ACAAACGCTGCATTTGACCCGAGTCCTTAA |
| NM_000075 | CTACATAAGGATGAAGGTAATCCGGAGTGA |
| NM_004064 | GACGGTTCCCCAAATGCCGGTTCTGTGGAG |
| NM_004454 | CCCACTTTGAAGACAGCCCCGCTTACCTCC |
| NM_001775 | GAGGATTCATCTTGCACATCTGAGATCTGA |
| NM_176783 | CAGGGGAGAAACAAAGGGAATGATCTATTG |
| NM_001826 | ACGAGGAGTTTGAGTATCGACATGTCATGC |
| NM_016187 | CTTCAAGTCTCCATGGTACCAGAAAACAAC |
| NM_006495 | CTCTATTCCTCCCAACTCTGATCAAGATCT |
| XM_042066 | AAGCATCCAGTCTTTCGTACTACATGGTAG |
| NM_005248 | GACTACTTCACCTCCGCTGAACCACAGTAC |
| NM_032663 | CCCTCACACCAGTATTTATCCTTAACACTC |
| NM_000633 | ACCCTGGGTGCCTATCTGGGCCACAAGTGA |
| NM_005100 | CAGGAGGAGAACCGAAATATCGAACAGATT |
| NM_014207 | GACTATGATCTGCATGGGGCTCAGAGGCTG |
| NM_005574 | GCCTGGACCCTTCAGAGGAACCAGTGGATG |
| NM_001831 | GCAGGAATACCGCAAAAAGCACCGGGAGGA |
| NM_006187 | GCTGCATGGGACGGAATGGCATCCCCATCC |
| NM_058176 | GCCCTTCTAGGAAATGAGCTGGAGCCACTT |
| NM_002738 | ACCAGTCCTAACACCTCCTGACCAGGAAGT |
| NM_001774 | GTCTACAACCGGCTCGCTCGATACCGTTAG |
| NM_133378 | TGGCTCCCTCTTCGACCGTCTGGTCCTCAA |
| NM_152866 | CCTCACCAATAGAAAATGACAGCTCTCCTT |
| NM_006184 | TTCTCGAGCGGCTCCCTGAGGTTGAGGTGC |
| NM_003955 | TTCCTGGACCAGTACGATGCCCCGCTTTAA |
| NM_002162 | ACGTCTATGCAGCCGACAGAAGCAATGGGG |
| NM_000598 | TGTGGATAAGTATGGGCAGCCTCTCCCAGG |
| NM_006472 | ACCACCGACTTATACTGAGGTGGATCCCTG |
| NM_005998 | AGAAAGGCGATGACCAGAGCCGGCAAGGCG |
| NM_000884 | CTCCATTCGTATGAGAAGCGGCTTTTCTGA |
| NM_006636 | GTCTAAAGAGCTTGGGGTAGCCACTAATTA |
| NM_000269 | CTGGTAGATTACACGAGCTGTGCTCAGAAC |
| NM_004619 | AGATGACACTCTGTTCTTGAAAGTGGCCGT |
| NM_004972 | GGATCAAATAAGGGATAACATGGCTGGATG |
| NM_156039 | CCCAGGCGATCTGCATACTTTAAGGACCAG |
| NM_002467 | CTTGTTGCGGAAACGACGAGAACAGTTGAA |
| NM_002460 | CAGATCTATCCGCCATTCCTCTATTCAAGA |
| NM_001242 | TGCAGAGCCTTGTCGTTACAGCTGCCCCAG |
| NM_001877 | TCTCCTCCTGTGACTCGCTGCCCTAATCCA |
| NM_004513 | GATGGACCTGTCACGATTGTCATCAGGAGA |
| NM_007289 | AAACAGATGTGCACAGTCCAGGCAATTTCA |
| NM_018209 | GATGATGGCTGGGACAACCAGAACTGGTAG |
| NM_001092 | AGGTTCTGGAGGACGAAGATGTGTTTCTCC |
| NM_002046 | GTGGACCTCATGGCCCACATGGCCTCCAAG |
| NM_002166 | CACGGATATCAGCATCCTGTCCTTGCAGGC |
| NM_001882 | ATCGGGGAATTCTGTTTGTCTGGTCTTTGA |
| NM_000698 | AGCCAGTGGTTCGCCGGCACTGACGACTAC |
| NM_021603 | TGACTGGGTTGTCGATGGACGGTGGCGGCA |
| NM_001923 | TGGCAGCGGTATGAAGCGAGAGGCCACTGC |
| NM_031966 | TAGTTCAAGATTTAGCCAAGGCTGTGGCAA |
| NM_001987 | CAGATGAAATCATGAGTGGCCGAACAGACC |
| NM_002574 | GACAAACATGGGGAAGTGTGCCCAGCTGGC |
| NM_000034 | TCAAATCCAAGGGCGGTGTTGTGGGCATCA |
| NM_004044 | TGGCTCCCGGCCAGCTCGCCTTATTTAGTG |
| NM_003656 | TGTTGCTGTCGAGACTGCTGCGTGGAGCCG |
| NM_002168 | CCGTATTATCTGGCAGTTCATCAAGGAGAA |
| NM_007146 | TGCCTTTCTTGCCCCAAGCTTTGCCTACAT |

TABLE 27

Polynucleotide probe sequences
for preparation of a large 50mer nucleic acid array

| GenBank | |
|---|---|
| Accession | |
| Number of | |
| Target gene | Oligonucleotide sequences (5′ to 3′) |
| NM_000246 | GGCTTTCCCCAAACTGGTGCGGATCCTCACGGCCTTTTCCTCCCTGCAGC |
| NM_005175 | GGCTGGCATTGGAACCGTGTTTGGCAGCTTGATCATTGGCTATGCCAGGA |
| NM_006559 | TGTGGGGAAGATTCTTGGACCACAAGGGAATACAATCAAAAGACTGCAGG |
| NM_030666 | CTTTTCTTTATTCGGCATAATTCCTCAGGTAGCATCCTATTCTTGGGGAG |
| NM_003955 | CCTATGAGAAAGTCACCCAGCTGCCGGGGCCCATTCGGGAGTTCCTGGAC |
| NM_018209 | GCCCCTCGGAGGGCCACAGTTATCAGAACAGCGGTCTGGACCACTTCCAA |
| NM_001165 | CAACATTTGACTTGTGTAATTCCAATCCTGGATAGTCTACTAACTGCCGG |
| NM_014670 | GTCTGAGCTGACTCTGTTACTGAAGATTCAGGAGTATTGCTATGACAACA |
| NM_144578 | CACACCAGGACTCTATCCTACTCCCAGTAATCCTTTCCAAGTGCCTTCAG |
| NM_144628 | CGGTTTCGGGGACTTCTGCGGCCTGAAGATCGAACAAAAGATGTCCTGAC |
| NM_032263 | AAGATTCGGCCACTTACAACAGTCTCCTGCAAGCTTTGAGCAAAGAGAGG |
| NM_006579 | GGGCCACCCTCTCTACTTCTGGTTTTACTTTGTCTTCATGAATGCCCTGT |
| NM_000877 | TGGTCAGGGGACTTTACACAGGGACCACAGTCTGCAAAGACAAGGTTCTG |
| NM_002266 | CCAGAAACTACCTCTGAAGGCTACACTTTCCAAGTTCAGGATGGGGCTCC |
| NM_018462 | GCTCGGGTGACAAAAGGTGAGACACTCACTAGAACAGTGCCGTGCTGCTG |
| NM_002444 | CATGCTGAGAACATGCGACTGGGCCGAGACAAATACAAGACCCTGCGCCA |
| AB032991 | GGAAGGTATGGTGCTATCTGCGGATTTGGCCTTTCCTTGATCAAATGGAT |
| NM_004762 | ATCAGCAGGGACCCTTTCTACGAAATGCTCGCAGCACGGAAAAAGAAGGT |
| NM_000295 | TGACCACCGTGAAGGTCCCTATGATGAAGCGTTTAGGCATGTTTAACATC |
| NM_030674 | GCCTGCTCATCGAGTAATGGTGAAGGCCACTGAAACCCGCCGAGAAAAAG |
| NM_022743 | TGAGACTGGCTTTTGATATTATGAGAGTGACACATGGCAGAGAACACAGC |
| NM_003217 | CGTCCTTGTTGATACTCAACTCATTATTGAAAAGGCCGAACATGGAGATC |
| NM_022366 | GCGTTCCAAAGATTGTGCTTATAAATGGCTGTATGATGAAACCCTGGAAG |
| NM_014268 | CTAATGGACATCCTGTATGCTTCAGAAGAACACGAGGGCCACACAGAAGA |
| NM_003352 | CTCTTTGAGGGTCAGAGAATTGCTGATAATCATACTCCAAAAGAACTGGG |
| NM_001923 | GCAAACCTACAGTATGACGATGGCAGCGGTATGAAGCGAGAGGCCACTGC |
| NM_033503 | TGAGGAACCCCAGCGACTCTTTTATGGCAATGCTGGCTATCGGCTTCCTC |
| NM_001776 | CCCTGGTCCTTTTCACAGTGGCCATCATAGGCTTGCTTATCTTTCACAAG |
| NM_178155 | AAAGTTCGAGAGAAGATAGAAACGGTCAAGTACCCCACATATCCTGAGGC |
| XM_088315 | CCAGTACTACCGGCCCCTGCATGATGAGTACTGTTTCTACAATGGCAAAA |
| AK024458 | TTCCCGGTGAGGTCAGGCCTCGTATTACATAAAAATACCTGTGCTGGGAC |
| NM_014397 | TGTCACCGGAGAGGATCCATGAGAACGGCTACAACTTCAAGTCCGACATC |
| NM_005969 | TTTTTCCGTGAGCGGATAGTCCCGCGGGCTGTGCTGTACTTCACTGGGGA |
| NM_002221 | CGGGAGGATGGCTACCTCTCGGGGCTCAATAACCTCGTCGACATCCTGAC |
| NM_013314 | TAGATCAACCAAGCCAAATTCCTCAACGCCCGCCTCTCCTCCAGGAACAG |
| NM_004844 | TGGGATGATGTTCCCAGTGTTGGGCCCTCGAAGTGAATGCAGCGGGGCCT |
| NM_001759 | CAGCAGTACCGTCAGGACCAACGTGACGGATCCAAGTCGGAGGATGAACT |
| NM_001987 | AAAATATTCCGGATAGTGGATCCCAACGGACTGGCTCGACTGTGGGGAAA |
| NM_002827 | CTACGGTCCTCACGGCCGGCGCTTACCTCTGCTACAGGTTCCTGTTCAAC |
| NM_004513 | TGGGTGGCACTGCCATGCAGGGCCTCACACGGTTTGAAGCCTGGAACATC |
| NM_001237 | CTACCTCAAAGCACCACAGCATGCACAACAGTCAATAAGAGAAAAGTACA |
| NM_172164 | GGAGGTCAGGAGAAGCAGGGAGAGGTAATTGTGAGCATAGAGGAGAAGCC |
| NM_000424 | CCAGTCAAGTGTGTCCTTCCGGAGCGGGGGCAGTCGTAGCTTCAGCACCG |
| AB037771 | GCCAACCAGAACTAGACTCTATTTCTACCTGTCCAAATGAGACAGTTTCA |
| NM_025113 | AGCCCATTTTCAATTTGCTGAGCATCGGCCAAAGCCTGTATGCGAAAGCC |
| NM_032873 | ACCAATCCTTCCTCTTACCCATGGACCAACTGGGGGCTTCAACTGGAGAG |
| NM_023037 | TCCTCACTACTTTTCTTCCAGACTCCAGTGTTTCTGGCACTAGTCTCTGA |
| AF509494 | AAGAAGAAAGGCGACAGCAACTTCGTAGGAAGGTAGTTGAAATTCTTCCA |
| NM_004556 | AGGCTGGTGCCCAGGTAGATGCCCGCATGCTGAACGGGTGCACACCCCTG |
| NM_002984 | CAGCCAGCTGTGGTATTCCAAACCAAAAGAAGCAAGCAAGTCTGTGCTGA |
| BC025340 | CGCAGCATGGAGTCTGCTCTCAGCTGTTGGGGAATTACCGATGCCTTTGA |
| NM_030926 | CCCCTCGCAACTTCTGGGAGCTCCTCATGAACGTGAAGAGGGGGACCTAC |
| AF331856 | GGTATTTGGTTTCCCAGTCCACTATACTGACGTCTCCAACATGAGCCGCT |
| NM_000483 | CCGCTGTAGATGAGAAACTCAGGGACTTGTACAGCAAAAGCACAGCAGCC |
| NM_001888 | CAGCCCACTGTGAGAAGACCACGGTGTTCAAGTCTTTGGGAATGGCAGTG |
| NM_003804 | AGCTATCTTTGATAATACCACTAGTCTGACGGATAAACACCTGGACCCAA |
| AB018263 | TCAGGACCACCCTGCTGCTTAACTCCACGCTCACTGCCTCGGAGGTCTGA |
| NM_006230 | CCGGACACTCTAGGTTGTTACCCCTTCTACAAAACTGACCCGTTCATCTT |
| NM_006475 | GCAGTCTTCAGCCTATTATCAAAACTGAAGGACCCACACTAACAAAAGTC |
| NM_001786 | AATCCTACAGGGGATTGTGTTTTGTCACTCTAGAAGAGTTCTTCACAGAG |
| NM_031942 | CGGCAGCGAGATGGACGGTGTGCGACTGGGGTCCTTGTGTATTTAGCCAA |
| NM_001640 | CGCATGGAGAACATTCGATTCTGCCGCCAATACCTGGTGTTCCATGACGG |
| NM_002483 | GTGCTCCTGTCCTCTCAGCTGTGGCCACCGTCGGCATCACGATTGGAGTG |
| NM_003915 | CACACCCATCCAGGTGCAATGCTCCGATTATGACAGTGACGGGTCACATG |
| NM_018842 | AACTCCGCCCGACTGTGACGAATGATCGCTCGGCACCCATCATTCGATGA |
| NM_147180 | CCACAATGGGAAACGAGGCCAGTTACCCGGCGGAGATGTGCTCCCACTTT |
| NM_004924 | AACCCCTACACCACCGTCACCCCGCAAATCATCAACTCCAAGTGGGAGAA |
| NM_002276 | CCTGCTCGAGGGACAGGAAGATCACTACAACAATTTGTCTGCCTCCAAGG |
| NM_002695 | GGTGAAGATCATCCGGCCCAGTGAGACGGCTGGCAGGTACATCACCTACC |
| NM_003480 | CTGCCCCCTAGGAGACTCCGTCGCTCCAATTACTTCCGACTTCCTCCCTG |
| NM_002023 | CAACAATGTCTACACCGTCCCCGATAGCTACTTCCGGGGGGCGCCCAAGC |
| NM_006216 | GCCGCTGAAAGTTCTTGGCATTACTGACATGTTTGATTCATCAAAGGCAA |
| NM_021813 | GAGAAACTGTTGTCAGAGAGGAATCAACTGAAAGCATGCATGGGGGAACT |
| NM_003651 | GCAGGTGAAGCACCAACTGAGAACCCTGCTCCACCCACCCAGCAGAGCAG |
| NM_006565 | GAGAGGACGACCCCCTGGCAGAACCAACCAGCCCAAACAGAACCAGCCAA |
| NM_005537 | GGGGTGGAGGGTGGACGAGTTGATTTGAACGTCTTCGGGTCGCTCGGCCT |
| NM_004235 | CGTGGCCCCGGAAAAGGACCGCCACCCACACTTGTGATTACGCGGGCTGC |
| NM_006235 | AAGAGGATAGCGACGCCTATGCGCTTAACCACACTCTCTCTGTGGAAGGC |
| NM_016269 | CTATCAACCAGATTCTTGGCAGAAGGTGGCATGCCCTCTCCCGTGAAGAG |
| NM_006164 | TCAGCACCTTATATCTCGAAGTTTTCAGCATGCTACGTGATGAAGATGGA |
| NM_003222 | CGAACATACAGAACTGCTTGTCTCATTTCAGCCTGATTACCCACGGGTTT |
| NM_000700 | GCCATAAGGCATTGATCAGGATTATGGTTTCCCGTTCTGAAATTGACATG |
| NM_019846 | GGGCACATCAGGGGAAACACGAAACATACGGCCATAAAACTCCTTATTAG |
| NM_032738 | CAGAAACAGCATCTGTTGTGGCTATCACAGTCCAAGAACTGTTTCCAGCG |
| BC019046 | TCACCATCTTCATCACACTCTTCCTGTTAAGCGTGTGCTACAGTGCCACC |
| NM_016732 | CATCTTTGACTATGATTACTACCGGGACGACTTCTACGACAGGCTCTTCG |
| NM_002189 | GAGCGCTGTGTCTCTCCTGGCATGCTACCTCAAGTCAAGGCAAACTCCCC |
| NM_004827 | AGGGCATCGATCTCTCACCCTGGGGCTTGTGGAAGAATCACGTGGCCTTG |
| NM_001830 | TTGCCCAGAGGAGGGAACTGATTCTCGCAATAAATAACGCCAGACAGAGG |
| NM_020944 | CAAACAGGGCACAGGACTAAGGACAGGGCCTATGTTTGGACCAAAGGAAG |
| NM_017784 | AGGAACGGAAGCGCGAGAACCTCCGCACACCATGGAAGCCCAAATATTTT |
| NM_002933 | TGTGGCCTGTGAAGGGAGCCCATATGTGCCAGTCCACTTTGATGCTTCTG |
| NM_022829 | CCTTCCCGGACTGGGCTGATATGTACTCGGTCAATGTCACAGCATTGCCA |
| NM_006399 | CCCACGCATTCCACCAACCTCATGTCAGCTCCCCGCGCTTCCAGCCCTGA |
| NM_002893 | CCTTCGAATCTCATAAAGATGAAATTTTCCAGGTCCACTGGTCTCCACAT |
| NM_003339 | AGATGATCCTTTAGTGCCTGAGATTGCTCGGATCTACAAAACAGATAGAG |
| NM_005277 | AATCTCTGCTTGGACCTTCGTCAGTTTGGAATTGTGACAATTGGAGAGGA |
| NM_006820 | CAAAGCCGGGTCATGAATGTCCATAAAATGCTAGGCATTCCTATTTCCAA |
| NM_024728 | CCCATGGCCCCTTCCTTCATCTTCAAGGATCAGCAAGGGTATTACACAAT |
| NM_025263 | GCTTTCACAAGGAACAGAGAAACCCTCGAAGGCTCAAAAGCTGGTCTCTT |
| BC046632 | AGCAGTGCCGGTGCATGTCCGTGAACCTGAGCGACTCGGACAAGCAGTGA |
| NM_024713 | CAGGCCACCTGCCTGAAAAATTACACCATGATAGTCGAACATATTTGGTT |
| NM_014365 | TTGACAGCCTCTTGGCCCGACTGGGCTCTGCCTCGTCTCTCCTCCGCCTG |
| NM_002947 | CGCGCATCAACGCCGGCATGCTAGCTCAATTCATCGACAAGCCTGTCTGC |
| AK092000 | ATCGAGCATGCTATTCCAGTGTACTGAACATACTGTATACCTCGTGTTAG |
| NM_022436 | GCTCAAATGTTTCTGTGACAACTAATCCAATGTGTGCCTTCACTCAAGGA |
| NM_002967 | TGATGAACCGAGGAGGAATGTCAGGGCGCGGCAGCTTTGCCCCAGGCGGG |
| BX647445 | ACTGTTGCCCTGGCTGTATTCATAAGATTCCAGCTCCTTCAGGTGTTTGA |
| BC022095 | CATGCGCACGGGGTTCCTAGCTCCCACGTCTATGTTCACATTTGTGGTCC |
| NM_006808 | GCCCTGTTCCAGTATTGGTTATGAGTCTTCTGTTCATCGCTTCTGTATTT |
| NM_031305 | CAGACTGTCCACCTATGATAATGTCCATCAACAGTTCTCCATGATGAACC |
| NM_014792 | CCGGTGAGCTTGTGGTGTGGGTTTTCAGGCTGTATCCTTCTACCTCCTGA |
| NM_006304 | GTAGAGGATGACTTCTCTAATCAGTTACGAGCTGAACTAGAGAAACATGG |
| NM_014686 | TGTGAACCAGGATAACAAAACCAAAACGTGGCCACCCAAAGCACCCTGGC |
| AB029034 | CAGGCAAACCGCAGCACCACACCTATGGCCCCCGGTGTCTTCTTGACCCA |
| BQ722784 | ATCGGTCTTTCTCTTTCAATCCTCACCCGGGATATTTGACCCCTTCCATG |
| NM_198243 | CTGTGTGCACGGATGTTATATAATTACGGAGCAGACACGAACACACGGAA |
| NM_016570 | GCACATGCCATTCTGGCAGTTTTTTGTAAGACTCTGTGGTATTGTTGGAG |
| BC001077 | CCACTGCCCTCTAAGACCTTGGAAGGGGAAACACCAGAAGGTGTGGGTGC |
| NM_138379 | ACATTGGAGATAGTAAAAATGTCCTCAATGACGTGCAGCATGGAAGGGAA |
| NM_024319 | ATGTTCGGCTCCAGTCGTGGAGGCGTGCGCGGCGGGCAGGACCAGTTCAA |
| NM_015670 | CCTATTTTGACTCGCAGCGTACCCTAAACCGCCGCTGCCCTAAGCATATT |
| NM_015436 | CCTTGCTGTGACAAGCTTTATACTTGCCGCTTGTGTCATGATAACAATGA |
| NM_001240 | AATCCTCGGTCTGGTGGAATCTCCTCGAGATCTGGCAATACAGACAAACC |
| NM_001261 | ATGTTTTGGTCAAGTTCACGCTGTCTGAGATCAAGAGGGTGATGCAGATG |
| NM_003095 | GCAAATACAGAAGAATACATAGATGGAGCTTTGTCTGGACATCTGGGTGA |
| NM_021102 | TGCACCGCCAACGCAGTCACTGGGCCTTGCCGTGCATCCTTCCCACGCTG |
| NM_006819 | GCTACCAGCGCTGTATGATGGCGCAGTACAACCGGCACGACAGCCCCGAA |
| NM_032966 | AGTTCCGCAGTGACCTGTCGCGGCTCCTGACGAAGCTGGGCTGTACCGGC |
| NM_006284 | ATTCGGCTCATCTCCTTAGCTGCCCAGAAATTCATCTCAGATATTGCCAA |
| NM_003199 | TTCACCTCCTGTGAGCAGTGGGAAAAATGGACCAACTTCTTTGGCAAGTG |
| NM_030752 | ACCTCGAGACAACAAACAAGCAGGGGTGTTTGAACCAACCATAGTTAAAG |
| NM_003299 | AGAATGCTTCGCCTCAGTTTGAACATTGACCCTGATGCAAAGGTGGAAGA |
| NM_006758 | ATGGACAGCCGATCCACGCCGAGCTGTCACCCGTGACGGACTTCAGAGAA |
| NM_194259 | AGTACGAGAAAAGGGTCCGAGCACAAGCCAAGAAGTTTGCGCCCTCATAA |
| NM_003366 | CAATGGCAGCAAGTGGAAATTTGGGACATACACCTTTTGTTGATGAGTTG |
| NM_006004 | ATGCGAGGGACCATTGCGTGGCCCACAAACTCTTTAACAACTTGAAATAA |
| NM_003374 | TGGACAGCAGGAAACAGTAACACGCGCTTCGGAATAGCAGCCAAGTATCA |
| NM_006761 | ATTTTTCCGTATTCTACTACGAAATTCTTAATTCCCCTGACCGTGCCTGC |
| NM_005781 | AGCTCTTCGGGCTGGGTCTGCGGCCCAGAGGGGAGTGCCACAAAGTGCTG |
| NM_005243 | TTAAAAAGTACCCGTACTCAGTACTCAGCCGGCAGCATAATGAAAAGTGG |
| NM_003902 | GCTGAGTATTATAGACAACAAGCAGCCTATTATGCCCAGACAAGTCCCCA |
| NM_006769 | GAATCGCCTGGTCCCGGGAGATCGGTTTCACTACATCAATGGCAGTTTAT |
| NM_004689 | GCTGGCCGGGCCTGCGAGAGCTGTTACACCACACAGTCTTACCAGTGGTA |
| NM_006875 | TTCCCAGCCCATGTCTCCCCAGACTGCTGTGCCCTAATCCGCCGGTGCCT |
| NM_002953 | CTGGCAGGATATACTCCATTTGCCAACGGTCCCAGTGACACACCAGAGGA |
| NM_004965 | AGCTAAACCTCCTGCAAAAGTGGAAGCGAAGCCGAAAAAGGCAGCAGCGA |
| NM_000592 | GCAGCCTGTGCCCAGCTCAACGACTTCCTCCAGGAGTATGGCACTCAGGG |
| NM_178014 | CGGCCGATACCTCACCGTGGCTGCTGTCTTCCGTGGTCGGATGTCCATGA |
| NM_005742 | TCAGGGAGCTCTCTTTTGGGCGTGGCTCCACGGCACCTGTAGGAGGCGGG |
| NM_001901 | TGGGCCTGCCCTCGCGGCTTACCGACTGGAAGACACGTTTGGCCCAGACC |
| NM_004907 | GGGACGTTGGACTGGTCCCGAGCAAGAAAGCCCGTCTGGAAGAAAAGGAA |
| NM_003070 | GCGGAGGGAAGATGCCCGGAACCCGAAACGGAAGCCCCGTTTAATGGAGG |
| NM_001255 | ATGAGACCCTGAGGCTATGGCGCTGTTTTGAGTTGGACCCTGCGCGGCGG |
| NM_002417 | CCTACGGAAACTGAAATTCACAATGAGCCATTTTTAACTCTGTGGCTCAC |
| NM_006209 | ATACATAGGATGGATCATTATGCTGCGGAAACTCGTCAGGACAAAATGAC |
| NM_002162 | AGAGCACCTATCTGCCCCTCACGTCTATGCAGCCGACAGAAGCAATGGGG |
| NM_000587 | AGACGATGTCTGAGTGTGAGGCGGGCGCTCTGAGATGCAGAGGGCAGAGC |
| NM_031243 | GAGGAGGATCTGATGGATATGGCAGTGGACGTGGATTTGGGGATGGCTAT |
| NM_003017 | CACTCCGAAGTGTGTGGGTTGCTAGAAACCCACCCGGCTTTGCTTTTGTT |
| NM_004994 | AACCAGGTGGACCAAGTGGGCTACGTGACCTATGACATCCTGCAGTGCCC |
| NM_002966 | CGCTGGGGATAAAGGCTACTTAACAAAGGAGGACCTGAGAGTACTCATGG |
| NM_001345 | CCGGGCTGCATTGTGTATGGTGCCACCTAGAGATCCACGATGACTGCCTG |
| NM_002497 | GAACATCATGAGGAGTGAGAATTCTGAGAGTCAGCTCACATCTAAGTCCA |
| NM_000545 | GCCTCACGCCCACCAAGCAGGTCTTCACCTCAGACACTGAGGCCTCCAGT |
| NM_006184 | GCCGAGCAGGATCCCAATGTACAGGTGGATCATCTGAATCTCCTGAAACA |
| NM_000598 | AGTTCCTCAATGTGCTGAGTCCCAGGGGTGTACACATTCCCAACTGTGAC |
| NM_006152 | AGGACTCATGGACGTCTCTAGAACATATCTTGTGGCCATTTACCAGACTC |
| NM_006274 | GACCAGCCCTGGGTAGAACGCATCATCCAGAGACTGCAGAGGACCTCAGC |
| NM_001428 | CATCCTGCCAGTCCCGGCGTTCAATGTCATCAATGGCGGTTCTCATGCTG |
| NM_002415 | TGCACAGCATCGGCAAGATCGGCGGCGCGCAGAACCGCTCCTACAGCAAG |
| NM_003234 | ATGAAACGCTGTTCAGAAACCAGTTGGCTCTAGCTACTTGGACTATTCAG |
| NM_001728 | TCGTGAGTTCCTCGCAGGGCCGGTCAGAGCTACACATTGAGAACCTGAAC |
| NM_002460 | GCAATCCAGAAGATTACCACAGATCTATCCGCCATTCCTCTATTCAAGAA |
| NM_003403 | CCCTCATAAAGGCTGCACAAAGATGTTCAGGGATAACTCGGCCATGAGAA |
| NM_001344 | TGGGGAGTTTCATCCTAGCGGTTTGCCTGAGAATACAGATCAACCCACAG |
| NM_002648 | CTGTATGATATGGTGTGTGGAGATATTCCTTTCGAGCATGACGAAGAGAT |
| NM_006585 | CTTACCTGGGAAAATATTGGGCTATCAAACTCGCTACTAATGCTGCAGTC |
| NM_001826 | TATTCGGACAAATACGACGACGAGGAGTTTGAGTATCGACATGTCATGCT |
| NM_002466 | TACTCCATGGACAACACTCCCCACACGCCAACCCCGTTCAAGAACGCCCT |
| NM_005582 | GCAAACCCGCCATCTCTAAGGGGAGTTAAGCTATCTGATGTCAAGCTTTC |
| NM_001831 | TGACTCTGATCCCATCACTGTGACGGTCCCTGTAGAAGTCTCCAGGAAGA |
| NM_000038 | CAGGGCCAGTGCAGCACTCCACAACATCATTCAGTCACAGCCTGATGACA |
| NM_001226 | GAGACAATCTTACCCGCAGGTTTTCAGATCTAGGATTTGAAGTGAAATGC |
| NM_005190 | GAGAGCAGGGTCCAAATGGAAGTCAGAACTCTAGCTACAGCCAATCTTAA |
| NM_001795 | ACGTGGATTACGACTTCCTTAACGACTGGGGACCCAGGTTTAAGATGCTG |
| NM_030582 | GGGCACCACTCACGGGGCCCTCAGTGCCACCACCATCTTCAGAGCGCATC |
| NM_001848 | CGACAACCTGAGGGACAGGTACTACCGCTGTGACCGAAACCTGGTGTGGA |
| NM_004378 | CGTTTGGCGCCGATGACGTGGTCTGCACCAGAATTTATGTCCGGGAATGA |
| NM_004380 | GCCACGTTGCCTCCGCACAGCCGTTTACCATGAGATCCTTATTGGATATT |
| NM_005215 | CCAACAGAGGATTCAGCCAATGTGTATGAACAGGATGATCTGAGTGAACA |
| NM_004948 | AGAGGGACTGGAGTTTCTAGATCACCTGGAACCCAAATTTAGGACATTAG |
| NM_001397 | AGGCGCTGAGGGAGTCCGTGCTGCATTTGGCCTTGCAGATGTCGACGTAC |
| NM_004448 | GCCTCTTAGACCATGTCCGGGAAAACCGCGGACGCCTGGGCTCCCAGGAC |
| NM_001982 | AAAAACTCTACGTAGCTTAGAGGCTACAGACTCTGCCTTTGATAACCCTG |
| NM_006137 | TCGGCGGCATGTGTGGTGTACGAGGACATGTCGCACAGCCGCTGCAACAC |
| NM_005245 | ATGCCCCTTACCCGCCAGGGTATCAAAGACACTTCGAGGCGCCCGCTGTC |
| NM_004119 | AGATGGATTTGGGGCTACTCTCTCCGCAGGCTCAGGTCGAAGATTCGTAG |
| NM_182925 | GCCGCCAGGTATTACAACTGGGTGTCCTTTCCCGGGTGCCTGGCCAGAGG |
| NM_000629 | CTCTCCCGTTTGTCATTTATGCTGCGAAAGTCTTCTTGAGATGCATCAAT |
| NM_001552 | GGTGCCTGCAGAAGCACTTCGCCAAAATTCGAGACCGGAGCACCAGTGGG |
| NM_000572 | TAAGGGTTACCTGGGTTGCCAAGCCTTGTCTGAGATGATCCAGTTTTACC |
| NM_000640 | GGTCTGCTTTTGCGTAAGCCAAACACCTACCCAAAAATGATTCCAGAATT |
| NM_000564 | GAAGTCATCTGTTATATAGAGAAGCCTGGAGTTGAGACCCTGGAGGATTC |
| NM_176786 | GCATGTTGCTCCCTTCTGTCCTCAGCAAGGCTCGGTCCTGGACATTCTAG |
| NM_000213 | GTAAGGACCCAGGAACTAGGCCTGGCCGGAGATGTGGCTGAACGAGGTCT |
| NM_001967 | TTGGAGATTGAGTTCAAGGAGACCCAAGCACTAGTATTGGCCCCCACCAG |
| NM_004933 | GGACGACCTTCGAGACAATGTCCTCAACTACGATGAGCAAGGAGGCGGGG |
| NM_000224 | CTTGGTGATGCCTTGGACAGCAGCAACTCCATGCAAACCATCCAAAAGAC |
| NM_002758 | GAATTCCAAAGAACGGCCTACATACCCAGAGCTAATGCAACATCCATTTT |
| NM_002412 | CAGCGGAGCCGTGGGCAACTACTCCGGAGGACTGGCCGTGAAGGAATGGC |
| NM_004530 | TGAAGAGCGTGAAGTTTGGAAGCATCAAATCCGACTGGCTAGGCTGCTGA |
| NM_002422 | TTTCCCTCCAACCGTGAGGAAAATCGATGCAGCCATTTCTGATAAGGAAA |
| BC063294 | ACAAGCCGCATACGCACCCAGAGCTTTTCCTTGCAGGAGCGTCAGTTGCG |
| NM_004557 | CGGCCCAACCCTGCGATAATGCGAGGAAGATACGGAGTGGCTGCCGGGCG |
| NM_002514 | TCATTGGGACCTGCACCTGTCACACCAACTGTCCTAAGAACAATGAGGCC |
| NM_000300 | ACCAGTACTATTCCAATAAACACTGCAGAGGGAGCACCCCTCGTTGCTGA |
| NM_001276 | AGTGGGTAGGATACGACGACCAGGAAAGCGTCAAAAGCAAGGTGCAGTAC |
| NM_000535 | CACTGAAAGGGCTAAACTGATTTCCTTGCCAACTAGTAAAAACTGGACCT |
| NM_015869 | GACAGATTGTCACGGAACACGTGCAGCTACTGCAGGTGATCAAGAAGACG |
| NM_002805 | GAACGAACTAAATGCTAAAGTTCGCCTATTGCGGGAGGAGCTACAGCTGC |
| NM_000314 | GGAAGTCTATGTGATCAAGAAATCGATAGCATTTGCAGTATAGAGCGTGC |
| NM_002868 | AGGGGTGCCCAAGCTGCAATCGTGGTTTACGACATTACTAATCAGGAAAC |
| NM_002901 | GTTGGAAGCCAAGCTACCAATTACGGGGAAGATCTCACAAAAAATCATGA |
| NM_003821 | GTCTTCAGCCTTACCCGGAAATACTTGTGGTTTCTAGATCACCATCTTTA |
| NM_005617 | CAGAGCCCTTGCCCGCTCGGGTATGAAGATCGGGCGGATTGAGGATGTCA |
| NM_014624 | CCTTCCTGGGGGCCTTGGCTTTGATCTACAATGAAGCCCTCAAGGGCTGA |
| XM_044622 | CCAGGAGATTGAAGGACCTAGTGTGAGCATAATGGAAAAAACACAATCAC |
| NM_000602 | ATGTTCAGACAGTTTCAGGCTGACTTCACGAGTCTTTCAGACCAAGAGCC |
| NM_003012 | AGAAAATGAAAAACCATGAGTGCCCCACCTTTCAGTCCGTGTTTAAGTGA |
| AF311912 | ACAAGCTGAACGGTGTGTCCGAAAGGGACCTGAAGAAATCGGTGCTGTGG |
| NM_139276 | TCACCTTTGACATGGAGTTGACCTCGGAGTGCGCTACCTCCCCCATGTGA |
| NM_003220 | GCCAGGGACTTTGGGTACGTGTGCGAAACCGAATTTCCTGCCAAAGCAGT |
| NM_003225 | TGTGCAAATAAGGGCTGCTGTTTCGACGACACCGTTCGTGGGGTCCCCTG |
| NM_003842 | AGCACAGTGGGGAAGCCCCAGCTGTGGAGGAGACGGTGACCTCCAGCCCA |
| NM_000546 | AGTATTTGGATGACAGAAACACTTTTCGACATAGTGTGGTGGTGCCCTAT |
| NM_138764 | GGCCTTCTGGAGCAGGTCACAGTGGTGCCCTCTCCCCATCTTCAGATCAT |
| NM_001328 | AAACCGTCAAGCCCGAGGCGGATAGAGACCACGCCAGTGACCAGTTGTAG |
| NM_058197 | ATTGGAATCAGGTAGCGCTTCGATTCTCCGGAAAAAGGGGAGGCTTCCTG |
| NM_000594 | CCCCCAGAGGGAAGAGTCCCCCAGGGACCTCTCTCTAATCAGCCCTCTGG |
| NM_003810 | TAGACATGGACCATGAAGCCAGTTTTTTCGGGGCCTTTTTAGTTGGCTAA |
| NM_001798 | ACCCTTTCTTCCAGGATGTGACCAAGCCAGTACCCCATCTTCGACTCTGA |
| NM_002609 | AAACCCGAGGTTGCTGACGAGGGCCCACTGGAGGGTTCCCCCAGCCTAGC |
| NM_003005 | CTAGGAACATATGGAGTTTTTACAAACGCTGCATTTGACCCGAGTCCTTA |
| NM_002985 | GCAGTCGTCTTTGTCACCCGAAAGAACCGCCAAGTGTGTGCCAACCCAGA |
| NM_000964 | AGCATATGTTCGGGGATTTGGTGTGCAGTTGGAAATTGGCAGCCATTGAG |
| NM_024408 | CAGGACGGGCAGGTAGCTCAGACCATTCTCCCAGCCTATCATCCTTTCCC |
| NM_001465 | GATACCTCTGATTTCCCTGTTTCATCAGCAGAGATGAGTCAAGGAACTAA |
| NM_001618 | GGTGTAGACGTTCCTCTTGGGACCGGGATTTCATCTGGTGTGATAGACAC |
| NM_078487 | GTGCGACAGCTCCTGGAAGCCGGCGCGGATCCCAACGGAGTCAACCGTTT |
| NM_004322 | GGACTTCCTCGCCCGAAGAGCGCGGGCACAGCAACGCAGATGCGGCAAAG |
| NM_021960 | AAGGACAAAACGGGACTGGCTAGTTAAACAAAGAGGCTGGGATGGGTTTG |
| NM_138578 | AGCTTTGAACAGGATACTTTTGTGGAACTCTATGGGAACAATGCAGCAGC |
| NM_004383 | CGTCCAGAAGCGGGAGGGCGTGAAGGCGGGTACCAAACTCAGCCTCATGC |
| NM_015583 | GCCAGGTAGGTTGGAATGTTCAGTGATGTTCTGTAGTCATATCAGACAGT |
| XM_373407 | CCGCCGCAACCTCAGCTACACCTGCCGGTCCAACCGTGACTGCCAGATCG |
| NM_016734 | TTGTGACAGGCCGTGACTTGGCGAGCACGACCCTCCCCGGGTACCCTCCA |
| NM_000808 | CAACAGTGTCAGCAAGGTTGACAAAATTTCCCGCATCATCTTTCCTGTGC |
| NM_002964 | TCTGGTGATAAAGATGGGCTGGCAGCCCACAAAAAAAGCCATGAAGAAAG |
| NM_002965 | AGATGCACGAGGGTGACGAGGGCCCTGGCCACCACCATAAGCCAGGCCTC |
| NM_001250 | CCAGGAGATCAATTTTCCCGACGATCTTCCTGGCTCCAACACTGCTGCTC |
| NM_003407 | TCCTGTCGCTGAGCCCTGACGTGCCCGTGCCATCCGACCATGGAGGGACT |
| NM_003674 | GGAGAAGCCCCTACCCTGTGAGCCGGAGCTCATGCCGACCTTTCCCCACC |
| NM_078467 | GCATGACAGATTTCTACCACTCCAAACGCCGGCTGATCTTCTCCAAGAGG |
| NM_006145 | CCCGAAAGGATTCCCCAGACATCAAGAACCGTACTTGAGCAGGTTCTTCC |
| NM_000122 | AGGCGCCCAGCAAACATGTACACCCGCTCTTCAAGCGCTTTAGGAAATGA |
| NM_006712 | TGCCGCTACCCTTCGAGGAACTGGAGTCCCAGAGAGGCCTGCCCCAGCTC |
| NM_000175 | TGCAGTGGCGAAGCACTTTGTTGCCCTGTCTACTAACACAACCAAAGTGA |
| NM_000162 | CCCAGACCAAGATCCCAACTCCCACAACCCAACTCCCAGGTAGAGCAGAT |
| NM_000852 | CCTCCCCTGAGTACGTGAACCTCCCCATCAATGGCAACGGGAAACAGTGA |
| NM_005526 | TAGAGGAGGCGAGTCCCGGGCGCCCATCTTCCGTGGACACCCTCTTGTCC |
| NM_001540 | TGGCTACATCTCCCGGTGCTTCACGCGGAAATACACGCTGCCCCCCGGTG |
| NM_002432 | GAACAGTTGACCGCAAGCTGAAACTGGTGTGTGGAAGTCACAGCTTCATC |
| NM_002505 | CATCCGCCTCAGGCCAGCAAGTCCAGACCCTCCAGGTAGTCCAAGGGCAG |
| NM_002511 | GGGAGGAAGTCCTATCAAGAGAGAGGAACCAGCTACCTACTCAGCTCTTC |
| NM_006170 | CTCTGTGAGGATGCCTTCTCTACTGTGCATACCCATGAAATTTAATACAC |
| NM_002910 | TTTCAAAGGCTGCTTCCACGTGCCGCGGTGCCTAGCCATGTGCGAGGAGA |
| NM_005281 | CTGCCTGCCTCCCACTATGTGGCCACCCGCAAGGGCATTGCCACACTGGC |
| NM_005981 | GATTTCGGAATCAGAAGGATCCTAGAGCCAACCCCAGTGCCTTTCTATGA |
| NM_003410 | GTTCTTCTGGAATGACCATGGACACAGAGTCGGAAATTGATCCTTGTAAA |
| NM_007146 | AATGAGACCTGTAGAGAGCATGCCTTTCTTGCCCCAAGCTTTGCCTACAT |
| NM_002419 | CTCGCCCCTTCGCAGCCGCATTGATCCCTGGAGCTTTGTGTCAGCTGGGC |
| NM_001197 | GGAGAACATAATGAGGTTCTGGAGATCCCCGAACCCCGGGTCCTGGGTGT |
| NM_000418 | GGACAGGGAGCCACCTCGCAGTCCGCAGAGCTCACATCTCCCAAGCAGCT |
| NM_006254 | GTGTGGACACGCCACATTATCCCCGCTGGATCACCAAGGAGTCCAAGGAC |
| NM_002166 | TTGGACCTGCAGATCGCCCTGGACTCGCATCCCACTATTGTCAGCCTGCA |
| NM_033306 | TTGACCATCTGCCTCCGAGGAATGGAGCTGACTTTGACATCACAGGGATG |
| NM_020250 | GGGCGGGGTTTAAGAGGACGACAGGTGTCTGTATTGCTCTACCTACCTAA |
| NM_002228 | TCCTCCCGTCCGAGAGCGGACCTTATGGCTACAGTAACCCCAAGATCCTG |
| NM_001654 | GCAAAATCTCCAGCAACTGCCCCAAGGCCATGCGGCGCCTGCTGTCTGAC |
| NM_004047 | GCCGTGGGAGTCTGCTACACCATTTTTGATTTGGGCTTCCGCTTTGATGT |
| NM_000729 | CCGGAAAGCTCCTTCTGGACGAATGTCCATCGTTAAGAACCTGCAGAACC |
| NM_006273 | CAGAAGGACCACCAGTAGCCACTGTCCCCGGGAAGCTGTAATCTTCAAGA |
| NM_001256 | ATCCCAGGAGAGCAGCATGACAGATGCGGATGACACACAACTTCATGCAG |
| NM_004073 | TTGTGGCCCGAAATCGTAGTGCTTGTACTTACCTCGCTTCCCACCTTCGG |
| NM_006268 | CGTGGCTACCACATGTACTGTCTCACCCCGTCCATGTCTGAGCCCCCTGA |
| NM_002104 | GAAATACCAGACTTGGATCAAAAGCAACCTTGTCCCGCCTCATACAAATT |
| AK127132 | TTTAAATATGCTCTGGTCTGGGGTCTCTCTGTGAAACACAATCCTCAGAA |
| NM_004422 | GGGAAGCAAGTGGGACTAGCGATGGGGGCCCTCCTCCATCCAGAGGCTCA |
| NM_006014 | TTGGAGGCGGAAATCGCCCATGGGTCCCTGGCACCAGATGCCGAGCCCCA |
| NM_003824 | CAGACACCAAGATCGACAGCATCGAGGACAGATACCCCCGCAACCTGACA |
| NM_002055 | GAAGGCCACCTCAAGAGGAACATCGTGGTGAAGACCGTGGAGATGCGGGA |
| NM_005313 | TGTGCCTTCTCCATATGAAGTCAGAGGTTTTCCTACCATATACTTCTCTC |
| NM_001513 | ATCTCACCCCCTACCCTACCATCAGCTCCATCAACAAGAGGCTGCTGGTC |
| NM_003883 | TGGCCAAGACCGTGGCCTATTTCTACGACCCCGACGTGGGCAACTTCCAC |
| NM_005339 | GACCTCCAGACACACCATATGAAGGAGGAAGATACCAACTAGAGATAAAA |
| NM_003549 | TCAGGGCCCCCTTCAAAAAGCCTGCTGGAGACACAATATCAAAATGTGAG |
| NM_004763 | ATGCTCTCTACTTAATAATCCGGATGGTGTGTTACGATGACGGTCTGGGG |
| NM_002301 | GCGGAATGGTGTCTCAGATGTTGTGAAAATTAACTTGAATTCTGAGGAGG |
| NM_004993 | GCTTCAGGCAGCTGTGACCATGTCTTTAGAAACTGTCAGAAATGATTTGA |
| NM_002790 | AGGAGAAGCTGAATGCAACAAACATTGAGCTAGCCACAGTGCAGCCTGGC |
| NM_002971 | CAAACTGAAGGACAATTCCGGTTTAGAGGTCGATGTGGCAGAATATAAAG |
| NM_003769 | AAGCACCAGCTATGGCTACTCACGGTCTCGGTCTGGGTCAAGGGGCCGTG |
| NM_181314 | GCTGCCCTGCTCCACCCCACGTCTGGCCTTCTGTCCACTGTGCTGCAGGA |
| NM_003262 | CAGTGACAGGAGGGAAGATGATCGATCCCAGCACAGTAGTGGAAATGGAA |
| NM_006497 | TCGCTGGATGAAGCACGAGCCGGGCCTGGGTAGCTATGGCGACGAGCTGG |
| NM_007117 | GTCCCAGATCTTTCAATCTGACTGGCTCTCCAAACGTCAGCATCCAGGCA |
| NM_006759 | TATTAGAGAACAAGATAGTGTCTGGAAACCTTCGCATCTTGGACCACTGA |
| NM_014232 | CCCTGCACCCCCTCCAAACCTCACCAGTAACAGGAGACTGCAGCAGACCC |
| NM_006299 | AATCACCGAGGAATCCACAATATACAGAAACGGTACCACTGCAAGGAGTG |
| NM_003427 | CCTCACCATCCCCAGTCCTGATGCCGACCTGGCCACATCTGGCACACATA |
| NM_000072 | GAGACCTGTGTACATTTCACTTCCTCATTTTCTGTATGCAAGTCCTGATG |
| NM_002211 | TGGTTGCTGGAATTGTTCTTATTGGCCTTGCATTACTGCTGATATGGAAG |
| NM_004242 | CCGTTGCTTTACTTTTTGCTTCACCGACATAGTCATTATGCCGAAGAGAA |
| NM_005589 | CCAATGTTCTCATTCACCGGCTCTCGATCCTCCTTCAGGGGAGACACCAA |
| NM_022067 | TAGAACTAGACCTGGAAGTTTCCAGTCCCTTTCTGATGCTCTGTCAGACA |
| NM_001752 | TACCGTGCTCGAGTGGCCAACTACCAGCGTGATGGCCCGATGTGCATGCA |
| NM_001793 | CGGCAACTTTATAATTGAGAACCTGAAGGCGGCTAACACAGACCCCACAG |
| NM_003159 | GTAAACCAAGCTGCGCTCCTGACATACCATGAGAATGCGGCACTGACGGG |
| NM_156039 | CGACTGTGTCTTTGGGCCACTGCTCAACTTCCCCCTCCTGCAGGGGATCC |
| NM_004941 | ATGAGGAACCCAATGCCTGGAGAATATCTCGAGCTTTCCGACGGCGCTGA |
| NM_021071 | CCTGATCCTATAGCTATTGCATCTCTCTCCTTTTTGACCAGTGTCATCAT |
| NM_005665 | GCTTCAAGGACAGCTTAACAAGTCTGATTCTAACCAGTATATTGGGGAAC |
| NM_004475 | CTGTGCATGCCCTCACAGGCGTGGACCTGTCTAAGATACCCCTGATCAAG |
| NM_002133 | AGAGGGAAGCCCCCACTCAACACCCGCTCCCAGGCTCCGCTTCTCCGATG |
| NM_004125 | CGAGCGCCCTGCAGCGCTTGGTAGAGCAGCTCAAGTTGGAGGCTGGCGTG |
| NM_002102 | TGGTGGGCGATGGCTCGTGTTATTTTTGAGGTGATGCTTGTTGTTGTTGG |
| NM_005318 | CCTCGGGGTCCTTCCGGCTAGCCAAGAGCGACGAACCCAAGAAGTCAGTG |
| NM_002108 | GAATCAAGACCTCTTTCTCCAACAGCCTTTTCACTGCAATTTCTGCACAA |
| NM_006644 | ATTTTGGTGCTGAACCTCCACATCAGAATGGTGAATGTTACCCTAATGAG |
| NM_181430 | GCCTCAGAAGGCCCCCATGTGCCAGCTCAGACTGGAGTTGCCTCAGTTGA |
| NM_014780 | CCTCACCTTCCATACCCTACAGATTCGCTCCCGGGGTGTGCCCTATGCCT |
| NM_005123 | ACGACCACAAGTTTACCCCACTTCTCTGTGAAATCTGGGACGTGCAGTGA |
| NM_000917 | CATGACCCTGAGACTGGAAAATTGACCACAGCACAGTACAGAGTATCTAA |
| NM_000869 | GACAAGCTGCTATTCCACATTTACCTGCTAGCGGTGCTGGCCTACAGCAT |
| NM_006218 | GATGTGTTACAAGGCTTATCTAGCTATTCGACAGCATGCCAATCTCTTCA |
| NM_005084 | CCAGGGACCAACATTAACACAACCAATCAACACATCATGTTACAGAACTC |
| NM_002890 | GCTCTCACCAAACTGCCCACTTCGTTGCTTGCTGAGACTCTCGGGCCAGG |
| NM_134269 | TCTACCGCTGTCTGGTCCAGAAGGGGCTGGTAAAAACCAAAAAGTCCTAA |
| NM_004177 | AGATGAAACGAAAAAAGCTGTGAAATACCAGAGTCAGGCCCGGAAGAAAT |
| NM_003242 | CCTGTGTCGAAAGCATGAAGGACAACGTGTTGAGAGATCGAGGGCGACCA |
| NM_003451 | CACTAACCTTATAATGCACAAGCGAATCCACAATGGCCAGAAACTCCATG |
| NM_019841 | CTGGGGCACTTGAATCTTGGACTGAACCTTAGTGAGGGGGATGGAGAGGA |
| NM_003177 | TCAGCGGGTGGAATAATCTCAAGAATCAAATCATACTCCTTCCCAAAGCC |
| NM_000277 | CGCTACGACCCATACACCCAAAGGATTGAGGTCTTGGACAATACCCAGCA |
| NM_053056 | AACAAACAGATCATCCGCAAACACGCGCAGACCTTCGTTGCCCTCTGTGC |
| NM_000873 | TATGAGCCTGTGTCGGACAGCCAGATGGTCATCATAGTCACGGTGGTGTC |
| NM_001092 | CTTCAGCTACGGGACGGACGAGTACGACGGAGAGGGGAATGAGGAGCAGA |
| NM_004454 | GGAGGACACCCTGCCGCTGACCCACTTTGAAGACAGCCCCGCTTACCTCC |
| NM_005225 | TTTCAGATCTCCCTTAAGAGCAAACAAGGCCCGATCGATGTTTTCCTGTG |
| NM_001760 | ACCCGCCATCCATGATCGCCACGGGCAGCATTGGGGCTGCAGTGCAAGGC |
| NM_004064 | AATAAGGAAGCGACCTGCAACCGACGATTCTTCTACTCAAAACAAAAGAG |
| NM_000075 | CAGAGGATGACTGGCCTCGAGATGTATCCCTGCCCCGTGGAGCCTTTCCC |
| L27560 | CGCCAAGCCCCCCTCAAGGTGGGACAGTACCCCGGACCCATCCACTCACT |
| NM_002467 | AGGAGGAACGAGCTAAAACGGAGCTTTTTTGCCCTGCGTGACCAGATCCC |
| NM_001175 | ACCTCAGCTGGGAGTGGAACCTGTCGATTAAGAAGGAGTGGACAGAATGA |
| AB007921 | GGTGCACAGTGGACATTTGGGGAGCGTTGTGGGTGACCCCCACACAGGCA |
| NM_000724 | TGTAACGTCACCCCACTCCAAAGAGAAAAGAATGCCCTTCTTTAAGAAGA |
| NM_005187 | GAGGACATAGCCATGGCCCACCACTTCCGAGATGCCTACCGCCACCCAGA |
| NM_002987 | GGGGCTTCTCTGCAGCACATCCACGCAGCTCGAGGGACCAATGTGGGCCG |
| NM_001803 | AGCGGAGGCATTTTCCTTTTCTTCGTGGCCAATGCCATAATCCACCTCTT |
| NM_014376 | GAGCTGGCCAGATACATTGAGACCAGTGCTCACTATGAAGAGAACAAGTC |
| NM_182908 | ACGTCAACGGGGAGAACATTGCGGTGGCAGGCTACTCCACTCGGCTCTGA |
| NM_004434 | TACCCCTGCTCGCAGTTCAGGGCTCCAAGCCACATCTACGGCGGGCACAG |
| NM_014210 | CAAAACAGCTCACAGGACCCAACCTAGTGATGCAATCTACTGGAGTGCTC |
| NM_013451 | AATTGGACAAAATAAATTAATTGGCACGGCGACTGTAGCCCTGAAGGACC |
| NM_003088 | ATCGTGTTCCGCGGGGAGCATGGCTTCATCGGCTGCCGCAAGGTCACGGG |
| NM_000156 | ACGGCAGACACACAAGGTCATCCCCTTGAAAGGCCTGTGGGAGGATGTGG |
| NM_002048 | TACGATGAGGACTACGATGACGAGCAGCGCACCGGGGGCGCGGGTGGTGA |
| NM_002051 | GACGGTCAAGGCAACCACGTCCCGCCCTACTACGGAAACTCGGTCAGGGC |
| NM_000169 | CTTCCCTGGGTAAAGGAGTGGCCTGTAATCCTGCCTGCTTCATCACACAG |
| BM722299 | CCTGCTCTCGCACCGTCCGAGCGGAGCTTTCGTTTTCAGTGAGCCAGGTG |
| NM_002224 | GTGAAGAACAAGACCGACTACACGGGCCCTGAGAGCTACGTGGCCCAGAT |
| NM_005335 | GGGAAGTGATGAGCTTTCCTTTGATCCGGACGACGTAATCACTGACATTG |
| NM_002167 | CAGACAGCCGAGCTCGCTCCGGAACTTGTCATCTCCAACGACAAAAGGAG |
| NM_004633 | AATACCCTGAGTTTTCAGACACTACGCACCACAGTCAAGGAAGCCTCCTC |
| NM_015187 | GGTTTTTTGGACCCCTGAAGTACTATCGCCTTCGCAGTCTGCACCCCGCC |
| NM_015196 | AATACTACCCGGGGTTCAACCCGTTTCGCGCCTATATGAACCTGGACATA |
| NM_005556 | GTGGCATTGGGCTGACCCTCGGGGGAACCATGGGCAGCAATGCCCTGAGC |
| NM_002752 | CAGACAGCAGTCTTGATGCCTCGACGGGACCCCTTGAAGGCTGTCGATGA |
| NM_005933 | GTTGCCCCTTCCCCATTAGTACTGGGGCAAGAACGGAGTTGCTTCTATAA |
| NM_005098 | AACCACCGCTTAAATCGGACTGGAACTCACTTGATGGGATTATTCGTTAA |
| U50748 | GGTGTGCTTTTGACTGACAAGTCAAGGGTATCGTGCCCATTCCCAGCCCC |
| AB033114 | CTCCCAAATTCTCCTTATCCACCATTCACATACGACTGACGGCCAAAGGA |
| NM_002499 | AGACAGGGCCAATTCCACAGAATCCGTTCGAAATACCCCCAGCACTGACA |
| NM_004289 | GCCAGTCAATCCCAACCACTATGCTCTCCAGTGTACCCATGATGGAAGTA |
| NM_005654 | TTCGTGCTCAACGCGGCCCAGTGCTCTATGCCGCTGCACGTGGCGCCGTT |
| NM_020992 | AAGTGTTAAAGCTCCTGTCACTAAAGTGGCTGCGTCGATTGGAAATGCTC |
| NM_003311 | CTGCTGGAACGCGGCCATCGCGCTGGCGCTCATCGATTTCCAGAACCGCC |
| NM_002661 | AGAAGATATGTTCAGCGATCCCAACTTTCTTGCTCATGCCACTTACCCCA |
| NM_015568 | CAAGGCTCCCTTGATCGGAGGCAGAACTTCACCGTACAGCAGCAATGGGA |
| NM_006115 | CCAGCTTACAACCTTAAGCTTCTACGGGAATTCCATCTCCATATCTGCCT |
| NM_080588 | GCTAGACAGAGGGGGGATGATCCAGACGGCAGAGCAGTACCAGTTCCTGC |
| NM_021038 | GCTGCACAGAAATTAATGCGAACAGACAGACTTGAGGTATGTCGAGAGTA |
| NM_006498 | TGAGCGTAAGGGGCGGGTTCAACATGTCCTCTTTCAAGTTAAAAGAATAA |
| NM_014904 | GGGGATCTGATAGCCCTTGTGACTTGAAATCACCTAATGCATTTAGTGAA |
| NM_002870 | CTGGCCCGGGACATCTTGCTCAAGTCAGGAGGCCGGAGATCAGGAAACGG |
| NM_002972 | TGCGGCCCTACAGCAACGTGTCCAACCTGAAGGTGTGGGACTTCTACACT |
| NM_003569 | GAAAATGCAGAGGTGCACGTTCAGCAAGCAAATCAGCAGCTGTCAAGGGC |
| NM_015055 | AGCCCTCCACCACACAAAGAAGCCCGCCAGCGTCGGAAAGAACTCCGGAA |
| NM_015173 | CCATAGTTGACTTTATAAAAAGCACGCTACCCAACCTTGGCTTGGTACAG |
| NM_016021 | ACCCAACCTGTAGCTAAGAATACCTCCATGAGCCCTCGACAGCGCCGGGC |
| NM_005573 | GGAGAGGAGGTTGCTCAAAGAAGTACAGTCTTTAAAACAACCATACCTGA |
| NM_031407 | TTGAAGACTCCTATCGTGAGCTGCATCGCAAATCCCCCGAAGAAATGAAG |
| NM_004665 | AGGTGCTGAAAGATGGGCGTTTGGTAAACAAGAATGGATCATCTGGGCCT |
| NM_001783 | AACGAGTCATACCAGCAGTCCTGCGGCACCTACCTCCGCGTGCGCCAGCC |
| NM_000626 | GCTTCACGGTGAAAATGCACTGCTACATGAACAGCGCCTCCGGCAATGTG |
| NM_006762 | AAGTGCGTGTGGCGGTGCTACAGATTGATCAAGTGCATGAACTCGGTGGA |
| NM_002838 | CACACCACAGCTCTGCTGCCTTACCTGCACGCACCTCCAACACCACCATC |
| NM_173216 | ACCTGCTTGGAAAAGCCACACTGCCTGGCTTCCGGACCATTCACTGCTAA |
| NM_002163 | CGGATGTTTCCAGATATTTGTGCCTCACACCAGAGATCATTTTTCAGAGA |
| NM_002339 | GTTTGTGGCCACCGGGCATGGGAAGTATGAGAAGGTGCTTGTGGAAGGGG |
| NM_152866 | AAGAAACAGAGACGAACTTTCCAGAACCTCCCCAAGATCAGGAATCCTCA |
| NM_006495 | GGAGTTCTCTATTCCTCCCAACTCTGATCAAGATCTTAATGAATCCCTGC |
| NM_005246 | AGCAAGCAAGAGAGCAAGTAGAAAGAGGATACCGGATGTCAGCTCCCCAG |
| NM_000698 | ACGGTCACCGTGGCCACTGGCAGCCAGTGGTTCGCCGGCACTGACGACTA |
| NM_004271 | CAAAGAGCTTTTTCTTGACCTAGCTCTCATGTCTCAAGGCTCATCTGTTT |
| NM_001715 | TCCTCCTGATGGAAGTTGTCACTTATGGGCGGGTGCCATACCCAGGGATG |
| NM_003254 | GGGTTCCAAGCCTTAGGGGATGCCGCTGACATCCGGTTCGTCTACACCCC |
| AK090461 | TCCTGAGCCTCTTCTACAGTACCACCGTCACCTTGTTCAAGGTGAAATGA |
| NM_004071 | CCAGGAAACGTAAATATTTTCACCACGATCGATTAGACTGGGATGAACAC |
| NM_000757 | CCCCTGCCCCGTTTTAACTCCGTTCCTTTGACTGACACAGGCCATGAGAG |
| NM_020548 | GACATAAATACAGAACGGCCCGGGATGTTGGACTTCACGGGCAAGGCCAA |
| NM_002017 | AGCGACGACCAGTCCCTCTTTGACTCAGCGTACGGAGCGGCAGCCCATCT |
| NM_000206 | ATAGCCCCTACTGGGCCCCCCCATGTTACACCCTAAAGCCTGAAACCTGA |
| NM_004559 | CTTCAATTACCGACGCAGACGCCCAGAAAACCCTAAACCACAAGATGGCA |
| NM_021975 | CTCCCCAATGGCCTCCTTTCAGGAGATGAAGACTTCTCCTCCATTGCGGA |
| NM_138933 | CCCCTTCTGTTAGAGAAATTTACATGAATGTACCTGTAGGGGCTGCGGGA |
| NM_005919 | GGGGCCCCGGCGACTTTCCTAAGACCTTCCCCTATCCCTTGCTCCTCGCC |
| NM_000026 | ATCATTTACTGGATCCTTCTTCTTTCACTGGTCGTGCCTCCCAGCAGGTG |
| NM_000687 | TGGGCATGTCCTGTGATGGCCCCTTCAAGCCGGATCACTACCGCTACTGA |
| NM_001621 | CGTCAGAAGCCAGACCTTTTCCTGATTTGACATCCAGTGGATTCCTGTAA |
| NM_001647 | ATCAAATCGAAGGTGAAGCCACCCCAGTTAACCTCACAGAGCCTGCCAAG |
| NM_001664 | CAGAGATATGGCAAACAGGATTGGCGCTTTTGGGTACATGGAGTGTTCAG |
| NM_152862 | GGAAGCAGTAGAAGTAACATTTGCAGATTTCGATGGGGTCCTCTATCATA |
| NM_005171 | TCTGTTCCAACTCCCATCTATCAGACTAGCAGCGGACAGTACATTGCCAT |
| NM_001519 | GGAGAGGCTTTGCTCCCAAGCTCTCCCACCCTCGAAGCTGAGCCTGCCAG |
| NM_000900 | TCAATAGGGAAGCCTGTGATGACTACAGACTTTGCGAACGCTACGCCATG |
| NM_001746 | CCGTGGCTGTGGGTAGTCTATATTCTAACTGTAGCCCTTCCTGTGTTCCT |
| NM_004347 | GCGAAAGAATCGCGTGGCTCATCAAATGTTTACCCAAACACTTCTCAATA |
| NM_005201 | TCTTCAACTACCTAGGAAGACAAATGCCTAGGGAGAGCTGTGAAAAGTCA |
| NM_000560 | GCTATGCGAAAGCAAGACTGTGGTTTCATTCCAATTTCCTGTATATCGGA |
| NM_004356 | TGACCACCTCAGTGCTCAAGAACAATTTGTGTCCCTCGGGCAGCAACATC |
| NM_001769 | TCAGTATGATCTTGTGCTGTGCTATCCGCAGGAACCGCGAGATGGTCTAG |
| NM_001827 | CCGGCATGTTATGTTACCCAGAGAACTTTCCAAACAAGTACCTAAAACTC |
| NM_000397 | AACCCTGAGTAAACAAAGCATCTCCAACTCTGAGTCTGGCCCTCGGGGAG |
| NM_004728 | GGAAGGCAGTCGAGGCTTCAGGGGACAGCGGGACGGAAACAGAAGATTCA |
| NM_021907 | TTCTTCCTTTCCTCATATAAATGTTTCTCCTCTTCTCCCCGCACATCATC |
| NM_006169 | CTGGCTACACAATCGAATGGTTTGAGGTGATCTCGCAAAGTTATTCTTCC |
| NM_004416 | TACTGGGCCGGTCCATCCGGCCCTGGCAGGGATGACCGGGATACTGCTGT |
| NM_001948 | CTGCTCTGAAGAGACACCCGCCATTTCACCCAGTAAGCGGGCCCGGCCTG |
| NM_001951 | GAGTCGAGTTCATCTAAGCCCGTGGTTTTTCCTGTTCCCCCACCTGATGA |
| NM_001961 | TGACCACTGGCAGATCCTGCCCGGAGACCCCTTCGACAACAGCAGCCGCC |
| NM_003752 | CTACCGCAAAAACGAGGGCTACATGCGCCGCGGTGGCTACCGCCAGCAGC |
| NM_001436 | GGACACTTTGTGATTTCCATTAAGGCCAACTGCATTGACTCCACAGCCTC |
| NM_005252 | GACATGGACCTATCTGGGTCCTTCTATGCAGCAGACTGGGAGCCTCTGCA |
| NM_000146 | CTGGGCTGGGCGAGTATCTCTTCGAAAGGCTCACTCTCAAGCACGACTAA |
| NM_012197 | TACAGGACTTGGAACACCATTTAGGGCTTGCCCTCAATGAGGTGCAGGCA |
| NM_000435 | TCCCAGTGAGCACCCTTACCTGACCCCATCCCCCGAATCCCCTGAGCACT |
| NM_005890 | CAATATGGAGAACAGCTTTGACGATGTTTCTTGCCTCTCTCCCCAGAACC |
| NM_002065 | GAAGATCGTCGCCCCTCTGCCAACTGCGACCCCTTTTCGGTGACAGAAGC |
| NM_002080 | AATTGGCATGTTCTGTTTCACAGGGCTAAAGCCTGAACAGGTGGAGCGGC |
| NM_002092 | CAAGGATCGGTCCCACGTTCATCATAGGTATATTGAACTGTTCCTGAATT |
| NM_004493 | TGGCTCCCATAGGTATCCGGGTGATGACCATTGCCCCAGGTCTGTTTGGC |
| NM_004964 | AATGCTGCCGCACGCACCTGGGGTCCAAATGCAGGCGATTCCTGAGGACG |
| NM_004494 | AAAAGAATAGCACCCCCTCTGAGCCCGGCTCTGGCCGGGGGCCTCCCCAA |
| NM_002129 | GCTATGACAGGGAGATGAAAAATTACGTTCCTCCCAAAGGTGATAAGAAG |
| NM_031266 | TATGGCTATTACGGCTACGGCCCCGGCTACGACTACAGTCAGGGTAGTAC |
| NM_014413 | CTCAAGACAAAGGGGTGAGGGATGACGGAAAGGATGGGGGCGTGGGATGA |
| NM_198336 | GCTTTTCTAGCTACGCTGATCACGCAGTTTCTCGTGTATAATGGTGTCTA |
| NM_000212 | ATAAAGAGGCCACGTCTACCTTCACCAATATCACGTACCGGGGCACTTAA |
| XM_290793 | CATCCATCTGGCAGATTGGAAGCGGGGAAGGAATGAAGCGTGTCCTGACT |
| NM_005956 | GGACGGCCCAGTTTGATATCTCTGTGGCCAGTGAAATTATGGCTGTCCTG |
| NM_005962 | GAGAGTGTGAACATGGCTACGCCTCTTCATTCCCGTCCATGCCGAGCCCC |
| NM_000265 | CGCCTCAGCCAGGACGCCTATCGCCGCAACAGCGTCCGTTTTCTGCAGCA |
| NM_005601 | GCCAACAGGGCATGGGGACATCATATCAGGCTACATCCACGTGACGCAGA |
| NM_002512 | GAAGAACTGGTTGACTACAAGTCTTGTGCTCATGACTGGGTCTATGAATA |
| NM_000270 | TTGTCTCCATTCTTATGGCCAGCATTCCACTCCCTGACAAAGCCAGTTGA |
| NM_004152 | TAACTGGCGAACAGTGCTGAGTGGCGGCAGCCTCTACATCGAGATCCCGG |
| NM_001604 | TGCAGATGCAAAAGTCCAAGTGCTGGACAATCAAAACGTGTCCAACGGAT |
| NM_002541 | CCAACTTCGACATCAATCAGCTATATGACTGCAATTGGGTTGTTGTCAAC |
| NM_013232 | GAGGTTGACGGATATATTCAGACGTTACGACACGGATCAGGACGGCTGGA |
| NM_021129 | TCTGCCTGCACAGTACCAACAGACGTGGATAAGTGGTTCCATCACCAGAA |
| NM_001198 | AAGAGAAGTGTACATACATTGTGAACGACCACCCCTGGGATTCTGGTGCT |
| NM_006406 | TTGGGCCAATAAGGATTCCACTTCTTTCAGATTTGACCCATCAGATCTCA |
| NM_002836 | GTCAAGAGCCTGCGGCTACAGAGGCCACACATGGTCCAGACACTGGAACA |
| NM_002871 | GACCAATTGGCTGGCATTGCCTAGATGACAAGAACAGTTTCTATGTGGCC |
| NM_002881 | AATCACAGAACATGAATCCTTTACAGCAACTGCCGAATTCAGGGAACAGA |
| NM_005777 | AACCAGCAAAAGACAGTCCAACGAGACTTATCGAGATGCTGTTCGAAGAG |
| NM_004159 | CTTCTAGTCTTCTGGTTGAAGCTGCGCCTTTAGATGACACGACCCTACCC |
| NM_002923 | AGAACAACTCTTATCCTCGTTTCTTGGAGTCAGAATTCTACCAGGACTTG |
| NM_000976 | CTGGGGACTGCCCAGTCAGTGGGCTGTAATGTTGATGGCCGCCATCCTCA |
| NM_000983 | GAAGAAGAATAATCTACGTGACTGGTTGCGCGTAGTTGCTAACAGCAAAG |
| NM_000969 | CCTCACAGTACCAAACGATTCCCTGGTTATGATTCTGAAAGCAAGGAATT |
| NM_000970 | CTCCAGGGCTACCTGCGATCTGTGTTTGCTCTGACGAATGGAATTTATCC |
| NM_000661 | GTTATCCAGGAGAATGGGTCTCTTGTTGAAATCCGAAATTTCTTGGGTGA |
| NM_002951 | CATCCTTCACCCCTGTAGGGGATGTTTTTGAACTAAATTTCATGAACGTC |
| NM_001028 | ACAGAGCTCAAGTAATTTACACCAGAAATACCAAGGGTGGAGATGCTCCA |
| NM_001031 | TGGAATTCATGGACGACACGAGCCGATCCATCATCCGCAATGTAAAAGGC |
| NM_001007 | CCTGTGTATGGTGACTGGAGGTGCTAACCTAGGAAGAATTGGTGTGATCA |
| NM_001009 | ACTCCACACGCATTGGGCGCGCCGGGACTGTGAGACGACAGGCTGTGGAT |
| NM_001011 | ATTGTGGGCAAGAGAATCCGCGTCAAACTAGATGGCAGCCGGCTCATAAA |
| NM_001013 | TGCTGCGGCGGCTGGTCCGCATTGGGGTGCTGGATGAGGGCAAGATGAAG |
| NM_003011 | TCGGCGCAGGCGGCCAAAGTCAGTAAAAAGGAGCTCAACTCCAACCACGA |
| NM_006427 | TGGACCACGTGTGGGATGAAGGCTGTGCCGTCGTTCACCTGCCAGAGTCC |
| NM_001636 | TTCTTCAAGGGTGCGTGGTCCAACGTCCTGCGGGGCATGGGGGGCGCCTT |
| NM_006516 | GCTTCCGGCAGGGGGGAGCCAGCCAAAGTGATAAGACACCCGAGGAGCTG |
| NM_002860 | ATGCCAGCACTCGCTTTTCTGATGGTTACCGCTTTGGACTGGGAGCTGAA |
| NM_003134 | ATTCCAAAGAAAGGTACTGTGGAGGGCTTTGAGCCCGCAGACAACAAGTG |
| NM_006280 | ATCGGCCTTGTGATCTACTACTTGGCCTTCAGTGCGAAGAGCCACATCCA |
| NM_003153 | CAATCTGGGATCTCAATGTCCCACATGGACCTAAGGGCCAACCCCAGTTG |
| NM_005801 | ACAGGGTGACCAACGCAAGAACATATGCCAGTTCCTCGTAGAGATTGGAC |
| NM_003258 | ATTGGGGGAGCAGACAAGTACCACTCCGTGTGTCGGCTCTGCTACTTCAA |
| NM_014220 | GGAATGGAATGTATCTCTGTTTTCTATCCTCTTGGCTCTTGGTGGAATTG |
| NM_003318 | TAAAGAATGACTTTCCACCTGCTTGTCAGTTGTCAACACCTTATGGCCAA |
| NM_006000 | CACCACCTTCTTCTGTGAAACTGGTGCTGGAAAACACGTACCCCGGGCAG |
| NM_006009 | CCTCGATATTGAGCGTCCAACCTATACTAACCTGAATAGGTTAATAGGTC |
| NM_006002 | ATGGAGCGCGACCCTGATGAACTAAGATTTAATGCGATTGCTCTTTCTGC |
| NM_000375 | ATCAAATTAAGTTTGCAGCCATCGGCCCCACTACGGCTCGCGCGCTGGCC |
| NM_003380 | GGACATTCCTGATTAAGACGGTTGAAACTAGAGATGGACAGGTTATCAAC |
| NM_000377 | CCCCTATTGTGGGGGGTAACAAGGGTCGTTCTGGTCCACTGCCCCCTGTA |
| NM_005080 | TGTCCTCTCTGCTTGGTGTAAACCATTCTTGGGAGGACACTTTTGCCAAT |
| NM_153380 | TCCCCCATAGCCCTTCCTCTACTAAGAATGAGAATGCTAAAACAGGAGCA |
| NM_012203 | CATCAGCAGGGGCGACGTCGTAAACCAGGACGACCTGTACCAGGCCTTGG |
| NM_001785 | CGTGTACATGACCAAGCCGGATGGTACGTATATTGTCATGACGGTCCAGG |
| NM_002341 | GGGGCGAGAGGGTGTACGTCAACATCAGTCACCCCGATATGGTGGACTTC |
| NM_001152 | CCGGGTTGACTTCCTATCCATTTGACACCGTTCGCCGCCGCATGATGATG |
| NM_144488 | GGGCCCTACAGAGATGCTCCGAGGCATGTACCTCACTCGCAACGGGAACC |
| NM_021966 | GAAGCAGCACGCCTGGCTGCCCTTAACCATCGAGATAAAGGATAGGTTAC |
| NM_002350 | TTATGTGAGAGATCCAACGTCCAATAAACAGCAAAGGCCAGTTCCAGAAT |
| NM_001774 | TGTGCAGAAACCTGGACCACGTCTACAACCGGCTCGCTCGATACCGTTAG |
| NM_013230 | CAGCCAGTCTCTTCGTGGTCTCACTCTCTCTTCTGCATCTCTACTCTTAA |
| NM_006325 | GCACAGTATGAGCACGACTTAGAGGTTGCTCAGACAACTGCTCTCCCGGA |
| NM_005340 | AATGTGCTGCTGATCTGGGCCTGAATAAGGGTTATCGAATGGTGGTGAAT |
| NM_002046 | ACAGCAACAGGGTGGTGGACCTCATGGCCCACATGGCCTCCAAGGAGTAA |
| NM_000334 | TGCTTGCCAACACCATGAGCAAGATGTATGGCCACGAGAATGGGAACAGC |
| NM_000484 | GTGGTTCGAGAGAAGTGGTATAAGGAAGTACATTCTGGCCAGGCACGATG |
| NM_170662 | GATAGCCCAGAATAATGTCGAAGTTGCCCGGAGCATCCTCCGAGAATTTG |
| NM_006904 | CCATGACCTCCAGGTTAGGATTAATTGAGTGGCTTGAAAATACTGTTACC |
| NM_133480 | GCTAATTGCCCAGGGCCTTTTGGAGTCTGAGGACCGCCCCGCAGAGGACT |
| NM_000633 | CCCTGGTGGGAGCTTGCATCACCCTGGGTGCCTATCTGGGCCACAAGTGA |
| NM_002086 | TTTCTTATCCGAGAGAGTGAGAGCGCTCCTGGGGACTTCTCCCTCTCTGT |
| NM_005248 | CAGCATCCCTGTACGAGGCCATGGAACAGACCTGGCGTCTGGACCCGGAG |
| NM_002447 | AACAGCCGCAGTTCTCACCCATGCCAGGGAATGTACGCCGGCCCCGGCCA |
| NM_003656 | AGATACAGCTCTAGATAAGAATATCCACCAGTCGGTGAGTGAGCAGATCA |
| NM_138980 | AAGACTAAAAATGGTGTAGTAAAAGGACAGCCTTCTCCTTCAGCACAGGT |
| NM_016072 | TAGAAGAGTGCCAGTCCTTGGATCCCTCCTAAATTTACCTGGAATTAGAT |
| NM_000785 | CACGGTGTCCAACACGCTCTCTTGGGCTCTGTATGAGCTCTCCCGGCACC |
| AF200348 | GTTCAAGCGCCTGCGAGATGGGGACAGGTTGTGGTATGAGAACCCTGGGG |
| BC060842 | GGGACATGTGAATTATATCCATGGAAGCAGTCAAGCCCAGTTTGTAGCTG |
| NM_006302 | TTTGGGAGCAGTACAGTGACCGCGATGGGCGAGGCATGTGCCGCCCTTTC |
| NM_020199 | GGAATACCATCGCCTAGATCAGAATGTTAATGAGGCAATGCCTTCTTTGA |
| NM_024006 | CTGCATTGTTTGTATCACCACCTATGCTATCAACGTGAGCCTGATGTGGC |
| NM_002229 | AAGGTGAAGACGCTCAAGGCCGAGAACGCGGGGCTGTCGAGTACCGCCGG |
| NM_024099 | CCCCTTCAAAGCCAGCCAGGACTAGTGAACCACAGCTCAAAAGGCAAAAG |
| NM_006378 | CGGATAGGGAGGACTCACAGAGGATCGACGACCTTTCTGCCAGGGACAAG |
| NM_033334 | CTGCCCCTCCTCTTTAAGGTGGTGCTGCATTCCTGCAAGACCAGTGTGGG |
| NM_002814 | ACACTGAGGGTAACACTCCTCTACACTTAGCCTGTGATGAGGAGAGAGTG |
| NM_017771 | CCACAAACAGTACTATTTTGCAGATGCTCATGTAAGCAGCTTTTCGAGAG |
| NM_003002 | TGGGGCCTTGGACAAGTTGTTACTGACTATGTTCATGGGGATGCCTTGCA |
| NM_003627 | GTGTTCGCCTTGCTTCAGCAGCCACTTTTCATGGCGATGGTGGGACCCCT |
| NM_005638 | TGTCACCTTCAAAACTACCAGCAGAAATCTTGCTCGAGCCATGTGTATGA |
| NM_003288 | CAGACCTCTACAAGAAGACTCAGGAAACTCTTTCACAGGCAGGACAGAAG |
| NM_003302 | TTCTTTGGTGTTCACTGGCATTTTGGGGGTGCACTGGCACTTTGGAACAA |
| NM_016308 | GCTTCGTGATGAAAGGAAGAACCCAGATTCACAGTATGGTGAACTTATTG |
| NM_006113 | CATTTCTCACGGCCTGTTGTGAGACGTTTGGAATGAGGAAAAGTGAACTT |
| NM_006802 | CATGGCATGAGGTGTTTGGGCATCCCAAATACTGCTCACTTTGCTAATGT |
| NM_004184 | AAACCAAGGTCAATAAGCATGCGTTTTCTGGAGGGAGAGACACCATCGAG |
| NM_000089 | AAGAGGGGAACGCGGTCCCCCAGGTGAGAGTGGTGCTGCCGGTCCTACTG |
| NM_004951 | ACGGCAAGTCAGTGTATCGATTTCTAGTGCTGTGAAGTCAGCCCCTGAAG |
| NM_002600 | GAAAGTTACTGGTGAATAAAAGCATTCGGCAGCGTCGTCGCTTCACTGTG |
| NM_005178 | GAGTGCCAAGAAACCGTGCAGCTCTTGCTAGAGCGCGGTGCCGACATCGA |
| NM_001753 | ATTCAGTGCATCAGCCGTGTCTATTCCATCTACGTCCACACCGTCTGTGA |
| NM_002414 | GGAATGCCAACGCAGAGCCAGCTGTTCAGCGTACTCTTTTAGAGAAATAG |
| NM_001788 | AACAAGAATAAAGGGCAGCTGACTAAGAGCCCTCTGGCACAAATGGAAGA |
| NM_004067 | GAGTCTCTGGGTTCACTGAACACATTGAAGATGTCAAAATGGCATTTGAC |
| NM_016184 | GCTGCGTTGTGCTAAATTTTCGTAAATCACCCAAAAGATGGGGCTGGAAT |
| NM_005627 | TCCCCAACTCCATTGGCAAGTCCCCTGACAGCGTCCTCGTCACAGCCAGC |
| NM_006329 | AGGGCAGAGAATTTTACATGCGGCAAACGGGCCCCATCAGTGCCACCCTG |
| NM_016195 | GAGGAGGACTTGGTGAAATGTGAAAATAAGAAGAATGCTACACCCAGAAC |
| NM_006310 | CTGGGAAGAACTTTATAACCGATACCAGGGAGGATTCTTAATATCCAGAC |
| NM_003707 | AACAGATCATTAAAATCCGTGCCCAGACGGAAGGAATCAACATCAGTGAG |
| NM_001845 | ACGCTTACAGCTTTTGGCTCGCCACCATAGAGAGGAGCGAGATGTTCAAG |
| NM_006803 | AACATAACATCAGTTTCCGGGACAGTAGTTCCCTTGGACGCTTTGAAATA |
| NM_001219 | TGGGAGGAGTATAAAAATGCCACCTACGGCTACGTTTTAGATGATCCAGA |
| NM_001260 | GCGTTCCAATCCACATGCTGCCTATCCCAACCCTGGACCAAGCACATCAC |
| NM_001916 | CTGGGCATCTGAGCCAGAGCACGACCATCGAAAACGCATGGGGCTCAAGA |
| NM_000121 | GGCTCCCGCCGCCTGAGACACCCATGACGTCTCACATCCGCTACGAGGTG |
| NM_002394 | AGCGCTCCCTACTGCATGGGGACTTCCACGCGTTCTCCGCTGGGCCTGGA |
| NM_004483 | GGAAAGTGTGAAAGCTGCTAGTGAACTCTATTCTCCTTTATCAGGAGAAG |
| NM_000521 | CTGACAAGGCACCGCTGCAGGATGGTCGAACGTGGAATAGCTGCACAACC |
| XM_167711 | GAAAGCGCAGTCCTGAAAGTCAGGTCACGATTATGGGCCCACACCTTCCT |
| AL833311 | ACTCATATTCTCGGTGTCCTGCTATCACACAGAACAACTTTCTAACCTAG |
| NM_013995 | CTAGTGTTGCTGGCTTATTTTATTGGTCTCAAGCACCATCATGCTGGATA |
| NM_024321 | CCTTCGTCCCCCACGTGCTACAGAGAGCAGATTCCGCTCTCTCCTCTGCA |
| NM_000946 | CTAAAACAGGTCGCATCTCTGTGCCTATTGATTTGCAGAAAGTGGACCAG |
| NM_004176 | GGGGACTGGTCCGTGCTCAGTACCCCATGGGAGAGCCTGTACAGCTTGGC |
| NM_002958 | AGCAGCTGGTACAGTGCCTAACAGAGTTTCATGCAGCCCTGGGGGCCTAC |
| NM_005063 | AAGGCCGCCATCTTGGCCAGGATTAAAAGAACCGGAGATGGAAACTACAA |
| NM_003132 | AGTCTCTTCAAGGAGTCCTATTACCAGCTCATGAAGACAGCCCTCAAGGA |
| NM_005100 | AATGGCCAGAAAGGAGCCCTGAACGGTCAAGGAGCCCTAAACAGCCAGGA |
| NM_021822 | AACCTTGGGTCAGAGGACGGCATGAGACTTACCTGTGTTATGAGGTGGAG |
| NM_020993 | GGGGGATCTGGAAGGAGTGCCACCCTCTAAAAAGATGAAACTGGAGGCCT |
| NM_015099 | CAGGCAGCTGCTCGGGGTCCCCCACCACAGTCAGTAGCAGGTGGGAGAAG |
| NM_005127 | ACCTCAGCGATGATGGTGCAGCAACAGCTAGATGTTACACCGAAAGAAAA |
| NM_004010 | AGACATTTAATTCTCGTTGGAGGGAACTACATGAAGAGGCTGTAAGGAGG |
| NM_002305 | GCGGGAGGCTGTCTTTCCCTTCCAGCCTGGAAGTGTTGCAGAGGTGTGCA |
| NM_000237 | GACTGAGAGTGAAACCCATACCAATCAGGCCTTTGAGATTTCTCTGTATG |
| NM_006187 | ACAGAGCTACAACGGGACTTCATCATCTCTCGCCCTACCAAGCTGAAGAG |
| NM_005419 | TTGCCCTGTGATCTGAGACATTTGAACACTGAGCCAATGGAAATCTTCAG |
| NM_002390 | ACCCACGGGGGAGACGGAGAGATATAAAGGTCCCAGCGGCACCAACATCA |
| NM_016187 | TTGTACTTCCCCCACCTTAATGACATCTCAGGTTGCTTCAGAGCCTGGAG |
| NM_014207 | CATCGCAACCACACGGCAACCGTCCGATCCCATGCTGAGAACCCCACAGC |
| NM_005214 | TGCAGCAGTTAGTTCGGGGTTGTTTTTTTATAGCTTTCTCCTCACAGCTG |
| NM_003564 | GCTGATGAATCTGGGTGGGCTGGCAGTAGCCCGAGATGATGGGCTCTTCT |
| NM_002002 | AGCCAGCGAAGGTTCCGCGGAGTCCATGGGACCTGATTCAAGACCAGACC |
| NM_004001 | CCAAGGCCCCAGACTAAGGACGGCAGCGAAGCAGAGCTCCCTCGTTGGTG |
| NM_058176 | GCCTGTGGCCAAAGAGTTTGATCCAGACATGGTCTTAGTATCTGCTGGAT |
| NM_001558 | ATCTGACTGGAGCTTTGCCCATGACCTTGCCCCTCTAGGCTGTGTGGCAG |
| NM_006850 | TCCGGAGAGCATTCAAACAGTTGGACGTAGAAGCAGCTCTGACCAAAGCC |
| XM_042066 | CTCCATCAAGAGAGCTACTGAAGCATCCAGTCTTTCGTACTACATGGTAG |
| NM_033004 | CCAGCCAGCCGTGGAACCTCAGGTGCAACAGAGACGCCAGGAGATACTAG |
| NM_002835 | CCAACAGAAGCCACAGATATTGGTTTTGGTAATCGATGTGGAAAACCCAA |
| NM_000593 | GCAGCTCCTGTACGAAAGCCCTGAGCGGTACTCCCGCTCAGTGCTTCTCA |
| NM_002927 | CTGGATGGCATGTGAAACCTATAAGAAAATTGCCTCACGGTGGAGCAGAA |
| NM_005012 | GCATCTTTACTAGGAGACGCCAATATTCATGGACACACCGAATCTATGAT |
| NM_000655 | CATGGTTACTGCATTCTCTGGGTTGGCATTTATCATTTGGCTGGCAAGGA |
| NM_005449 | TCCAGATGCCTGCATATGCCAGTTCTTCCAAATTCGTAACCAGAGTTACC |
| NM_133378 | TAATATCCTCTGGGGTACAGTCATGTATAACAAGTTTTCTGACCCTGCCA |
| NM_032663 | AAAGAAGCGTAGAAAAGGGCTTGTGCCTGGCCTTGTTAATTTAGGGAACA |
| NM_030753 | TGTTAGTGTCCAGGGAGTTCGCGGATGCGCGCGAGAACAGGCCGGACGCG |
| NM_017935 | CAAGACAGAGCTCGGATAGAGAGTCCAGCCTTTTCTACTCTCAGGGGCTG |
| NM_003202 | AGACAGGTGGCCTAGCAGGCACAGGACACCTGGCCGCCTCCAGGAGCCTA |
| NM_030764 | TGATGCCGGCAAATATTACTGTAGAGCTGACAACGGCCATGTGCCTATCC |
| NM_023109 | GTGGGCCAGTCTACTGGGAAGGAGACCACTGTCTCGGGGGCTCAAGTTCC |
| NM_002738 | GATTTTTCACCCGCCATCCACCAGTCCTAACACCTCCTGACCAGGAAGTC |
| NM_006472 | CCTGAGTTCAAGTTCATGCCACCACCGACTTATACTGAGGTGGATCCCTG |
| NM_000417 | TTATTATCAGTGCGTCCAGGGATACAGGGCTCTACACAGAGGTCCTGCTG |
| NM_001775 | GCCAGGATCCCACCATAAAAGAGCTGGAATCGATTATAAGCAAAAGGAAT |
| NM_005574 | TGTGCGAACAGGACATCTACGAGTGGACTAAGATCAATGGGATGATATAG |
| XM_034274 | CTCTAGAACTTATTGAATCTGATCCTGTAGCATGGAGTGACGTTACCAGT |
| NM_001706 | CTTCCGCTACAAGGGCAACCTCGCCAGCCACAAGACCGTCCATACCGGTG |
| NM_000902 | CAGAAATGCTTTCCGCAAGGCCCTTTATGGTACAACCTCAGAAACAGCAA |
| NM_001102 | ACACCGGCCCCGACTCCGTGCCAGGTGCTCTGGACTACATGTCCTTCTCC |
| NM_001718 | CCCGAGTATGTCCCCAAACCGTGCTGTGCGCCAACTAAGCTAAATGCCAT |
| NM_033554 | GGACCAGCCGCTCCTCAAGCACTGGGAGGCCCAAGAGCCAATCCAGATGC |
| NM_002122 | AGGAGACTGTCTGGTGTTTGCCTGTTCTCAGACAATTTAGATTTGACCCG |
| NM_019111 | TAACTGTGCTCACGAACAGCCCTGTGGAACTGAGAGAGCCCAACGTCCTC |
| NM_002124 | GGAGCACCCAAGCGTAACGAGCGCTCTCACAGTGGAATGGAGAGCACGGT |
| NM_014745 | CGTCCTCCCTATCAGACGACCAGGTACCCGAGGCTTTCCTGGTCATGCTG |
| NM_006993 | TCCCGGCCCCGGTCACTATGGACAGTTTTTTCTTCGGCTGTGAGCTCTCC |
| NM_014366 | GAGCATAAGAGCCATCAAGGGCCCTCATTTGGCCAATAGCATCCTTTTCC |
| NM_003255 | AGTGCAAGATCACGCGCTGCCCCATGATCCCGTGCTACATCTCCTCCCCG |
| NM_002658 | ACAAGGACTACAGCGCTGACACGCTTGCTCACCACAACGACATTGCCTTG |
| NM_002704 | CTTGTATGCTGAACTCCGCTGCATGTGTATAAAGACAACCTCTGGAATTC |
| NM_000090 | TTCTCCCCAGTATGATTCATATGATGTCAAGTCTGGAGTAGCAGTAGGAG |
| NM_002026 | CTGAGAGATGGACAGGAAAGAGATGCGCCAATTGTAAACAAAGTGGTGAC |
| NM_001766 | GCTTTACCTCCCGGTTTAAGAGGCAAACTTCCTATCAGGGCGTCCTGTGA |
| NM_006614 | TGGTGCCTACGCTGGATCTAAGGAGAAGGGATCTGTTGAAAGCAATGGAA |
| NM_004445 | TACTGGGACATGAGTGAGCAGGAGGTACTAAATGCAATAGAGCAGGAGTT |
| NM_006058 | CCAGGCCTACAGAACCAGAGCCAGCTGATCTCAGATTGCCAAGAAACTAG |
| NM_052938 | GGGACACATATGGAGGACAAGGTTTCCTTAGACATCTATTCCAGGCTGAG |
| NM_004126 | GGGAATTCCAGAAGACAAGAACCCCTTTAAAGAAAAAGGCAGCTGTGTTA |
| NM_007360 | TGAGAGCCAGGCTTCTTGTATGTCTCAAAATGCCAGCCTTCTGAAAGTAT |
| NM_004225 | GAAGATCAAAGACAACCCACTGATCCAGCCCCCCTACGAGGTCTGCATGA |
| NM_005940 | AAGGCTTCCCCCGTCTCGTGGGTCCTGACTTCTTTGGCTGTGCCGAGCCT |
| NM_003800 | TGCCAAAGAAGTGAGCCATGAAATGGATGGACTTATTTTTCAGCCTACTG |
| NM_030956 | TGCTAGGTCAATGCACACAAACATGGCACAGGGTTAGGAAAACAACCCAA |
| NM_003453 | GGACCGAAACACCTTGGAAAATATGCTTGTACGGGTTCTTCTAGTAAAAG |
| NM_018136 | CCTGTAAGGACCAGAATAGTTTCAAGACTTAAGCCAGATTGGGTTTTGAG |
| NM_000682 | GCATCTACCTGATCGCCAAACGCAGCAACCGCAGAGGTCCCAGGGCCAAG |
| NM_181802 | GTCAGGACCATTCTGCTCTCCATCCAGAGCCTTCTAGGAGAACCCAACAT |
| XM_058619 | ACATTGCCCGTCAGAAGCTTTTAGGTTTGTTCTGTCAGTCAAAACCAAGG |
| NM_016343 | CCAAAGCTGGACTGGAGTCCAAGGGCAGTGAGAACTGTAAGGTCCAGTGA |
| NM_018248 | GCAAGCGTTCCACCATGAAAACAGTATTGAAGATTGGACCTAACAATGGA |
| NM_000194 | GAGCTATTGTAATGACCAGTCAACAGGGGACATAAAAGTAATTGGTGGAG |
| NM_004526 | TGGCAAGCACAAGGTACGTGGTGATATCAACGTGCTCTTGTGCGGAGACC |
| NM_002426 | CCAAGAACTTCCAAGGAATCGGGCCTAAAATTGATGCAGTCTTCTATTCT |
| NM_002608 | CTGTCTCTCTGCTGCTACCTGCGTCTGGTCAGCGCCGAGGGGGACCCCAT |
| AF108138 | GGTGCCCGAGGGGTGGTAGTTGGGTTCGAGGCAGAAGGGAGAGGGCTACC |
| NM_002692 | CTACGACAAATACCGAATGCCTCTGCATAAACCCTGGCTCTTTTCCAAGA |
| NM_003349 | TTCAAGCGTCTTACCTGAAGTCACAAAGCAAACTGAGTGATGAAGGAAGA |
| NM_001067 | CTCCTCGGGCAAAATGTGTACGGGCAAAGAAACCTATAAAGTACCTGGAA |
| NM_013282 | TGCAAGCACTGCAAGGACGACGTGAACAGACTCTGCCGGGTCTGCGCCTG |
| NM_002356 | GGCGGCTGTGGCCTCGTCGCCTTCCAAAGCGAACGGACAGGAGAATGGCC |
| NM_002592 | AACGGTGACACTCAGTATGTCTGCAGATGTACCCCTTGTTGTAGAGTATA |
| NM_003113 | ACTCCCAGGGAATTTGAAATTGAAGGAGACCGCGGAGCATCCAAGAACTG |
| NM_005292 | GCGCAGAAAAAGTTTCCGATCTGGTAGTCTACGGTCACTAAGCAATATAA |
| NM_000022 | CTCCCAGCTAACACAGCAGAGGGGCTGCTGAACGTCATTGGCATGGACAA |
| NM_005163 | TACAAGGAGCGGCCGCAGGATGTGGACCAACGTGAGGCTCCCCTCAACAA |
| NM_001295 | TGTTTCAGGCTCTGAAACTGAACCTCTTTGGGCTGGTATTGCCTTTGTTG |
| NM_005191 | AGAGAAGGAGGAATGAGAGATTGAGAAGGGAAAGTGTACGCCCTGTATAA |
| NM_006889 | CCTGAAAGATCTGATGAAGCCCAGCGTGTTTTTAAAAGTTCGAAGACATC |
| NM_001846 | TGGTGATGTCTGCTACTATGCCAGCCGGAACGACAAGTCCTACTGGCTCT |
| NM_004460 | ACCAGAACCACGGCTTATCCGGCCTGTCCACGAACCACTTATACACCCAC |
| NM_032682 | CCATCCAGAATGGGTCGGGCGGCAGCAACCACTTACTAGAGTGCGGCGGT |
| NM_006120 | CTTCTGTGGCTGCTACCCCACTCCTGGGCCGTCCCTGAAGCTCCTACTCC |
| NM_002120 | ATATGTGAGGACGCAGATGTCTGGTAATGAGGTCTCAAGAGCTGTTCTGC |
| NM_006010 | TACATCCGGAAGATAAATGAACTGATGCCTAAATATGCCCCCAAGGCAGC |
| NM_005533 | TACCCCAAGGACAGCAGGGCCTAGCAGTCTTCACCTCTGAGTCAGGCTAG |
| NM_001560 | GTTACTCATTGTTCCAGTCATCGTCGCAGGTGCAATCATAGTACTCCTGC |
| NM_000632 | TCCTGATCGTGAGCACAGCTGAGATCTTGTTTAACGATTCCGTGTTCACC |
| NM_004972 | GGGATCTAGCTCTTCGAGTGGATCAAATAAGGGATAACATGGCTGGATGA |
| NM_004995 | CTCCCAGAGGGTCATTCATGGGCAGCGATGAAGTCTTCACTTACTTCTAC |
| NM_172390 | ACCTTTCTCCCGCTGCCTACACCAAGGGCGTTGCCAGCCCGGGCCACTGT |
| NM_005384 | CAGAGGTTGTCTCACTCAAGAGACTTATAGCCACACAACCAATCTCTGCT |
| NM_001675 | ATTTGATAGAAGAGGTCCGCAAGGCAAGGGGGAAGAAAAGGGTCCCCTAG |
| NM_000960 | GCCGTGGGAACGTCGTCCAAAGCAGAAGCCAGCGTCGCCTGCTCCCTCTG |
| NM_000963 | CGGACTAGATGATATCAATCCCACAGTACTACTAAAAGAACGTTCGACTG |
| NM_003037 | AAACAAATTCCATCACAGTCTATGCTAGTGTGACACTTCCAGAGAGCTGA |
| NM_003121 | GCGCGCGCCCTCCGAAACTACGCCAAGACCGGCGAGATCCGCAAGGTCAA |
| NM_007315 | CTCGGATAGTGGGCTCTGTAGAATTCGACAGTATGATGAACACAGTATAG |
| NM_006290 | GGCAATGCCAAGTGCAACGGCTACTGCAACGAATGCTTTCAGTTCAAGCA |
| NM_007115 | CTGGCACATTAGACTCAAGTATGGTCAGCGTATTCACCTGAGTTTTTTAG |
| NM_012452 | AGTCCGGCCAAGTCTTCCCAGGATCACGCGATGGAAGCCGGCAGCCCTGT |
| NM_003820 | AAGGTGATCGTCTCCGTCCAGCGGAAAAGACAGGAGGCAGAAGGTGAGGC |
| NM_005104 | TCCTCTGCACAGCAAGTAGCAGTGTCACGCCTTAGCGCTTCCAGCTCCAG |
| NM_000043 | GCTGGAGTCATGACACTAAGTCAAGTTAAAGGCTTTGTTCGAAAGAATGG |
| NM_003326 | GAATGGCGGAGAACTGATTCTTATCCATCAAAATCCTGGTGAATTCTGTG |
| NM_005658 | GCCTACGTGAAGGACGACACAATGTTCCTCAAGTGCATTGTGGAGACCAG |
| NM_006060 | CGCTGCCACAACTACTTGGAAAGCATGGGCCTTCCGGGCACACTGTACCC |
| NM_002371 | AGGGTGTCATCCAGGTACGTTCCAGCCGGCCAGCCATGCTCCTCCAGTGA |
| NM_005608 | AGAGCAGGTCCCCGTGCGGGCTGAGGAAGCCAGAGACAGTGACACGGAGG |
| NM_005348 | TGAACCTATGGGTCGTGGAACAAAAGTTATCCTACACCTGAAAGAAGACC |
| NM_000033 | CTCGCGTGTGGTGGCCAACTCGGAGGAGATCGCCTTCTATGGGGGCCATG |
| NM_004915 | GAAGAGGTAAAGCAGACAAAACGATTAAAGGGGTTGAGAAAGGACTCCTC |
| NM_005186 | GATCAGCGTGAAGGAGTTGCGGACAATCCTCAATAGGATCATCAGCAAAC |
| NM_005166 | ATGCGTCTGTTCCAAGGGGTTTCCCTTTCCACTCATCGGAGATTCAGAGG |
| NM_015193 | GACACGCAGATCTTCGAGGACCCTCGAGAGTTCCTGAGCCACCTAGAGGA |
| NM_001178 | GCAACCGCAAACGGAAAGGCAGCTCCACTGACTACCAAGAAAGCATGGAC |
| NM_004317 | GTGAAGCTGCCGCTGTTACCCCATGAGGTGCGGGGGGCAGACAAGGTCAA |
| NM_001187 | GCTGGAGGTTGGAGCCTGAAGACGGCACAGCTCTGTGCTTCATCTTCTGA |
| NM_172171 | GGATCACCAGAAACTAGAACGTGAGGCTCGGATATGTCGACTTCTGAAAC |
| NM_016280 | GGCTGAGGTAGGTCTCCGGCTGGTACGTCTCTGGCTGGACACCCACACCT |
| NM_000743 | GGACAGCAGGATTGTTTCTGCAACCCCTGATGGCCAGGGAAGATGCATAA |
| NM_001762 | TAAAATTCAAGCAGAACATTCAGAATCAGGTCAGCTTGTGGGTGTGGACC |
| NM_001910 | CTGCAAAACGCCATTGGGGCAGCCCCCGTGGATGGAGAATATGCTGTGGA |
| NM_000778 | ACCTGCTTGTCTACCTGTCTCCTACCCACCTGTATCTCTTGTTGGGAGAA |
| U53532 | ATGAATATCTTGGTAACTCACCTCGACTTGTCATTACGCCTCTAACTGAC |
| NM_001939 | CACACACTCCCGAATTGAGCATTTTGCGAGCAGGCTTGCTGAGATGGAAA |
| NM_004091 | GGTAGGCAGGGGAATGTTTGAAGACCCCACCAGACCTGGGAAGCAGCAAC |
| NM_001441 | AGCTGCAGGGTGCCGTGCCCTTCGTGCACACCAATGTTCCACAGTCCATG |
| NM_000148 | TTTGCTGGCGATGGACAGGAGGCTACACCGTGGAAAGACTTTGCCCTGCT |
| NM_001777 | CTATACAACCTCCTAGGAAAGCTGTAGAGGAACCCCTTAATGCATTCAAA |
| NM_002049 | ATGCGGAAGGATGGTATTCAGACTCGAAACCGCAAGGCATCTGGAAAAGG |
| NM_002068 | AAGAAGGGCGCACGATCCCGACGCCTTTTCAGCCACTACACATGTGCCAC |
| NM_005275 | CCCGGGCCATACCCGATACTTTCAGACCTACTTTCTTACCCCCTCTGTGA |
| NM_002076 | CCGTCTCATGTTCAGCAATCGCGGCAGTGTCAGGACTCGAAGATTTTCCA |
| NM_005288 | TTGATAGCGGATTACACCTACCCCTCCATCTATACCTACGCCACCCTCCT |
| NM_002094 | GTCGGATTTCTGTCCTTGGTACATTGGATTACCGTTTATTCCATATCTGG |
| NM_005513 | AAAGGAAGCATATATAGCAATGGGACAACGCATGTTTGAGGACCTCTTTG |
| NM_004963 | GGTAGCCAGCTATAAAAAAGGCACTCTGGAATACTTGCAGCTGAATACCA |
| NM_000182 | GATTTGAATTCTGACATGGATAGTATTTTAGCGAGTCTGAAGCTGCCTCC |
| XM_033511 | ATACTACCCCTCTGGTTTCCCGGAGTGTTCCACCAGTCAAACTGGAGGAT |
| NM_006825 | AGGACTGCTGTGGACAGTTTGGTTGCATACTCGGTCAAAATAGAAACCAA |
| NM_000867 | GTACCAGAGTCCAATGAGGCTCCGAAGTTCAACCATTCAGTCTTCATCAA |
| NM_006764 | TGCTGCCTTCAAAGCCCGGACCAAGGCTCGAAGCCGTGTGCGGGACAAGC |
| NM_000612 | GGAGGCCAAACGTCACCGTCCCCTGATTGCTCTACCCACCCAAGACCCCG |
| NM_006083 | GTATGGTATCAAAATGTCTGAAGGGCGGAAAACCAGGCGCTTCAAGGAAA |
| NM_006084 | CTGCCCAGCAACGAGTGCGTGGAGCTCTTCAGAACCGCCTACTTCTGCAG |
| XM_045712 | ATTAACACCGAACCCCTGTTTGGCACATTGAGAGATGGATGCCATCGGCT |
| NM_000229 | ATTTCCACACCCAGCTTCAACTACACAGGCCGTGACTTCCAACGCTTCTT |
| NM_000234 | GTGCTCAGGTGGCCTGTTTGTACCGGAAGCAAAGTCAGATTCAGAACCAA |
| NM_025247 | TTCAGCCTTTCAGTCCCTCTCTCTCTGCCTGTGGGAATCTGGACACATTT |
| NM_004255 | AACTTAGACCAACTTTAAATGAACTGGGAATCTCCACTCCGGAGGAACTG |
| NM_133259 | ATCTGTTTCTAAAGCGTTACGCATCTTTGCTGAAGTATGCTGGAGAGCCT |
| NM_000239 | GTGCAAAGAGGGTTGTCCGTGATCCACAAGGCATTAGAGCATGGGTGGCA |
| NM_005909 | CATGAGAAACAGCAAGATCTCAACATCATGGTTTTAGCAAGCAGCAGCAC |
| NM_002379 | CAGGCCCTGACCAGGAAACTGGAAGCTGTGAGTAAGCGGCTGGCCATCCT |
| NM_002396 | TGTATGAATGGCCAGAATCTGCATCAAGCCCTCCTGTGATAACAGAATAG |
| NM_139202 | TGAGGACCCTCCCAGGTTTCCCACTGCGGAACAGGAGTGACTCTGGCTGC |
| NM_002421 | CAAAATGATAGCACATGACTTTCCTGGAATTGGCCACAAAGTTGATGCAG |
| NM_002523 | CGTCGATGTGTTCGGAGGGGCCTCCAAGTGGCCCGTGGAGACGTGTGAGG |
| NM_001862 | AATACCAGCGTCGTCTGGTTTTGGCTGCACAAAGGCGAGGCCCAGCGATG |
| NM_006981 | AACAAGATCACAAGCAGTTTAAAAGACCACCAGAGTAAGGGACAGGCTCT |
| NM_002527 | AATAAACTCGTGGGCTGGCGGTGGATACGGATAGACACGTCCTGTGTGTG |
| NM_002557 | CATTCCTCTGTCAACTCAGTAACCCCTCAAACAAGTCCTCTTTCTCTAAA |
| NM_014735 | CCATGACTCTAGACGGGATTGCCATGGTAAAAGCAAGACACATCCCCTTT |
| NM_032940 | AATACGATCCAGACAATGCCCTGAGGCACACAGTGTACCCCAAGCCCGAG |
| NM_002739 | TGGAACGATTGGAGATCCCGCCTCCTTTCAGACCCCGCCCGTGTGGCCGC |
| NM_134260 | TGGGATTCTCCAAATACTCCATCAGTGTATCCTGTCTTCAGGTGATGCTT |
| NM_003973 | GCATGCAGCTCACTGATTTCATCCTCAAGTTTCCGCACAGTGCCCACCAG |
| NM_006642 | CATGCTGTTAATCAGCTCAAAGATTTGTTGCGCCAACAAGCAGATAAGGA |
| NM_002640 | AAGATTAGGAATGATCGATGCTTTTGACGAAGCCAAGGCAGACTTTTCTG |
| NM_004374 | GGCTGATCAAAGAAAGAAGGCATACGCAGATTTCTACAGAAACTACGATG |
| NM_005850 | CCGGGTGGGATGCCCCATCCAGGGATGTCTCAGATGCAGCTTGCACACCA |
| NM_000578 | GCTGAACAAGGTCGTCACCTCTTCCATCATGGTGCTAGTCTGCACCATCA |
| NM_014251 | GGTGTAACTTTGCTGACTTACGAATTGCTACAGCGATGGTTCTACATTGA |
| NM_006841 | GCGGCATGTGCTTATTGCCGTTGGCCTGCTCACTTGTATCAACCTGCTGG |
| NM_033262 | TGATGGGCCCCCGCATGGTGGATATGAGTTTTCAGAAAGCGCTCCTGTTA |
| NM_014720 | AGCTCATGAAACGCAGGAAAGAGGAGCTTGCACAAAGCCAGCATGCTCAG |
| NM_006938 | CCTGTACAGCTGGAAACGCTGAGTATTCGAGGAAATAACATTCGGTATTT |
| NM_003107 | CCGGGACCTGGATTTTAACTTCGAGCCCGGCTCCGGCTCGCACTTCGAGT |
| NM_012448 | CACAGAACCCTGACTCAGTCCTTGACACCGATGGGGACTTCGATCTGGAG |
| NM_006453 | CTGCGCTTCTGCGTCACGTGGAACACCAACTCGCGGCACTGCCACGAGGC |
| NM_003315 | AAGAAAAAGACTCGCTATGACAGTGGACAGGACCTAGATGAGGAGGGCAT |
| NM_170695 | ATACACAGAGTGGTCTTTTCAACACTCCTCCCCCTACTCCACCGGACCTC |
| NM_005077 | CCGTTCCTGTAAATTGCTACCCGATGGCTGCACTCTCATAGTGGGAGGGG |
| NM_133502 | AGGAGAAGCAGGAGGATGCAGCCATCTGCCCAGTGACAGTGCTCCCTGAG |
| NM_005157 | AGGCATGGGGGTCCACACTGCAATGTTTTTGTGGAACAAGCCCTTCAGCG |
| NM_004418 | CATCTGTCTGGCATACCTCATGCAGAGTCGCCGTGTGCGGCTGGACGAGG |
| NM_001719 | GACGCTGGTCCACTTCATCAACCCGGAAACGGTGCCCAAGCCCTGCTGTG |
| NM_006835 | CAAGACAAGAGGGACATGCTTCCCCTTGTCCACCTTTGCAGCCTGTTTCT |
| NM_000610 | CCAAACACCCAGAGAAGACTCCCATTCGACAACAGGGACAGCTGCAGCCT |
| NM_012287 | CTTGTTACGTTTAGCAAGAATGAATGAAGAGATGCGGGAATCAGAAGGAC |
| NM_003879 | TCTGGCTGCAGCACACTCTGAGAAAGAAACTTATCCTCTCCTACACATAA |
| NM_005197 | TGCCAGTGCCATGATGCTTTTGAATACTCCCCCTGAGATACAAGCAGGTT |
| NM_001882 | GAAAACCCAAATGGAAACAGTATCGGGGAATTCTGTTTGTCTGGTCTTTG |
| NM_001319 | CTCAGGTCTACTACTTCGGTCCGTGCGGGAAGTACAACGCCATGGTGCTG |
| NM_001921 | GTGCAGCAAGATTGTCATTGACTTTGATTCAATTAACAGCAGACCGAGTC |
| NM_006824 | TTTCCTTGAGGGAGATCAGAAACCTCTGGCACAGCGCAAGAAGGCAGGAG |
| NM_003648 | TCTGTGAGTATAAGGACATCTTCACACGGCACGACATCCGGGGCTCTGAG |
| NM_004441 | CCGCAGTGGCTGCGATGGAAGAAACGTTAATGGACACCAGAACGGCTACT |
| NM_002025 | CATACTGCTGGACACTCTGAGCAGAGCACCTTTTCCATCCCAGGACAGGA |
| NM_001530 | ATACAAGGCAGCAGAAACCTACTGCAGGGTGAAGAATTACTCAGAGCTTT |
| NM_005531 | AAAGTGGGAATACCGGGGAGTTGAGATCTGTAATTCATAGTCACATCAAG |
| NM_000874 | GCTATTCACAGGTGCAGTCATAATGCACTACAGTCTGAAACTCCTGAGCT |
| NM_014002 | GAACTGAGGTCCAGGCTGCGGACTCTAGCGGAGGTCCTCTCCAGATGCTC |
| NM_000628 | GCACCTGAAAGAGTTTTTGGGCCATCCTCATCATAACACACTTCTGTTTT |
| NM_000880 | GGAAGGTATGTTTTTATTCCGTGCTGCTCGCAAGTTGAGGCAATTTCTTA |
| NM_001567 | TTCAATAACCCTGCCTACTACGTCCTTGAAGGGGTCCCGCACCAGCTGCT |
| NM_001398 | TGAGCATGCTGCAGACCCAAGACCTCGTGAAGTCGGTCCAGCCCACGACT |
| NM_005544 | GTCTGGCCCGGTGGCTTTCCACAGCTCACCTTCTGTCAGGTGTCCATCCC |
| NM_002249 | GAGAAAGCGACTGAGTGACTATGCTCTGATTTTTGGGATGTTTGGAATTG |
| NM_002755 | ATACGGAATGGACAGCCGACCTCCCATGGCAATTTTTGAGTTGTTGGATT |
| NM_003954 | GAAAGTCCAAATACAGTCTCTTAATGGTGAACACCTGCACATCCGGGAGT |
| NM_002748 | CCTGCTTTTGATACCAATTACTCTACTGAGCCTTGTTGGCAATACTCAGA |
| NM_002408 | GGGGAGATATTAGGGACCATGAACTCTGTAAAAGTTATAGAAGACTGCAG |
| NM_004927 | CAACATCCCCGTCTACAAGGACATCACGCATGGCAACCGGCAGATGACTG |
| NM_004998 | GCAGTCTACCAGTTCAGACCGAGTGTCACAGACGCCAGAGAGCCTGGATT |
| NM_003908 | GACTCTATTTCCTACAGTGCGAAACTTGTCATTCTAGATGTTCTGTTGCC |
| NM_005009 | AGGCTGCCCCAGGAACCATAAGGGGTGACTTCAGCGTCCACATCAGCAGG |
| NM_002542 | CAGGTCATCACCACTTTTATGACCTTTCTCGGACCCCATAGGCTGGATCA |
| NM_012383 | GCACTGCCTTATACTGGGCTTGCCACGGGGGCCACAAAGATATAGTGGAA |
| NM_005746 | TATCTTTACATAGGACGCCAGCAGGGAATTTTGTTACACTGGAGGAAGGA |
| NM_002649 | CGAAGTTTGCAGAGACAAAGGATGGACTGTGCAGTTTAATTGGTTTCTAC |
| NM_021127 | GGCTCCAGCAGAGCTGGAAGTCGAGTGTGCTACTCAACTCAGGAGATTTG |
| NM_006237 | TCCCTGAGCACAAGTACCCGTCGCTGCACTCCAGCTCCGAGGCCATCCGG |
| NM_003479 | ATACCGACCTAAGATGCGATTACGCTTCAGAGATACCAATGGGCATTGCT |
| NM_014369 | TGATCCTGATGGCCTGTCGAGAGATAGAGAATGGGCGGAAAAGGTGTGAG |
| NM_002828 | GTCATTTTGGTTGGCGCTTTTGTTGGCTGGAGACTGTTTTTTCAGCAAAA |
| NM_001469 | AAAGACTGGGCTCCTTGGTGGATGAGTTTAAGGAGCTTGTTTACCCACCA |
| NM_001754 | GCCCTGGGAGGTGGGAGATCTTTGTATAAAAATTGGAACCCAAACTATAA |
| NM_006918 | CCTTTGAGGGGAAGGGACCGCTCAGTTATGTGAAGGAGATGACAGAGGGA |
| NM_004630 | GCAGGGCGAGCCCACGGCCACACTGGCACCTGAGCTGACCTTTGATTTCC |
| NM_003105 | GGGCTATGAGATACACATGTTTGATAGTGCCATGAATATCACAGCTTACC |
| NM_004509 | TCTTGAAGGCCTACTGTCATCCACAAAGCTCCTTTTTTACGGGCATCCCA |
| NM_007237 | TTTGTACAAGACATGCGCCTCATCTTCCAGAACCACAGGGCCTCTTACAA |
| NM_003120 | CACCCCCACCACGTGCACAGCGAGTTCGAGAGCTTCGCCGAGAACAACTT |
| NM_182692 | TGTCAGTTAACTCTGAGAAGTCGTCCTCTTCAGAAAGGCCGGAGCCTCAA |
| NM_001066 | CAGGTCAATGTCACCTGCATCGTGAACGTCTGTAGCAGCTCTGACCACAG |
| NM_006708 | GACCCTCGAGGATTCGGTCATATTGGAATTGCTGTTCCTGATGTATACAG |
| NM_003387 | TCCCTCAGTTCGTCCACGCCCCCGTTACCTTCGCCAGGACGTTCAGGTCC |
| NM_006748 | TTGGGGTAGACGAGTCCCTTTTCAGCTATGGCCTTCGAGAGAGCATTGCC |
| NM_001877 | GGGAAACAAATCCATTCACTGTATGCCTTCAGGAAATTGGAGTCCTTCTG |
| NM_000878 | AGTGGCTCTCTTCGCCCTTCCCCTCATCGTCCTTCAGCCCTGGCGGCCTG |
| NM_005923 | ATGACTTAAAATGCTTGAGACTAAGGGGAGGGATGCTGTGCACACTGTGG |
| NM_000941 | TGTGGGGATGCACGGAACATGGCCAGGGATGTGCAGAACACCTTCTACGA |
| NM_001242 | GGGCCCTGTTCCTCCATCAACGAAGGAAATATAGATCAAACAAAGGAGAA |
| NM_006994 | TCTGCAACAACCAATCAGAACCATAAGCTACAGGCACGCACTGAAGCACT |
| NM_001629 | TTTCCTCGCTGTGCTCTGGTCTGCGGGGCTACTTTGCAGCCAAGTTCCTG |
| NM_002107 | CGGTGCTTTGCAGGAGGCAAGTGAGGCCTATCTGGTTGGCCTTTTTGAAG |
| NM_021603 | GCTGTGGGGGCAATAAGAAGCGCAGGCAAATCAATGAAGATGAGCCGTAA |
| NM_003376 | AACTTCTGGGCTGTTCTCGCTTCGGAGGAGCCGTGGTCCGCGCGGGGGAA |
| NM_000034 | TCCCTTCCCCCAAGTTATCAAATCCAAGGGCGGTGTTGTGGGCATCAAGG |
| NM_005998 | CTGTGAGACCTGGGGTGTAAATGGTGAGACGGGTACTTTGGTGGACATGA |
| NM_002156 | AAGAGAAGGACCCTGGAATGGGTGCAATGGGTGGAATGGGAGGTGGTATG |
| NM_002168 | CCGCGGCGCCACTATGCCGACAAAAGGATCAAGGTGGCGAAGCCCGTGGT |
| NM_000884 | TGGAAGGTGGCGTCCATAGCCTCCATTCGTATGAGAAGCGGCTTTTCTGA |
| NM_005566 | CGGAATAAAGGATGATGTCTTCCTTAGTGTTCCTTGCATTTTGGGACAGA |
| NM_006636 | CTGCAAAAAAGGTGCTGAGGCTTGAAGAGCGAGAAGTGCTGAAGTCTAAA |
| NM_000269 | AAGGACCGTCCATTCTTTGCCGGCCTGGTGAAATACATGCACTCAGGGCC |
| NM_002629 | CGCCTCAATGAGCGGCACTATGGGGGTCTAACCGGTCTCAATAAAGCAGA |
| NM_000365 | TCCTTGTGGGTGGTGCTTCCCTCAAGCCCGAATTCGTGGACATCATCAAT |
| NM_001148 | GATGCTAGTTCTTTGGATTCAAAGACCAAATGCCCAGTAAAAACCCGAAG |
| NM_138271 | CAAAAGGTACAGTGATTGTACAGCCAGAGCCAGTGCTGAATGAAGACAAA |
| NM_004049 | TGCGGAGTTCATAATGAATAACACAGGAGAATGGATAAGGCAAAACGGAG |
| NM_006624 | CAAGAAGCTGGCAACACAGCACAAGCAACTGATTTCTCAGACCAAGAAGA |
| NM_004166 | TGCCAAACCCAGTGGTCCGGGAGTTCAGGATTGCATGAAAAAGCTGAAGC |
| NM_002989 | GCTATCCTGTTCTTGCCCCGCAAGCGCTCTCAGGCAGAGCTATGTGCAGA |
| NM_003542 | TGTGCTTAAGGTTTTCTTAGAGAACGTTATTCGAGACGCCGTCACCTATA |
| NM_012073 | GGGGACAAATGATATGAAGCAACAGCATGTCATAGAAACCTTGATTGGCA |
| NM_000732 | TGCAATACCAGCATCACATGGGTAGAGGGAACGGTGGGAACACTGCTCTC |
| NM_000733 | CCAGAAGATGCGAACTTTTATCTCTACCTGAGGGCAAGAGTGTGTGAGAA |
| NM_001781 | CACATTCTCAATGCCATCAGACAGCCATGTTTCTTCATGCTCTGAGGACT |
| NM_001809 | ACTTCAATTGGCAAGCCCAGGCCCTATTGGCCCTACAAGAGGCAGCAGAA |
| NM_001280 | AGTCAGAGTGGTGGCTACAGTGACCGGAGCTCGGGCGGGTCCTACAGAGA |
| NM_007096 | GGTTATGTCACAAACATAAACCATCCTTGCTACAGCCTAGAACAGGCAGC |
| NM_001891 | CCAAGAACTTCTACTTAACCCCACCCACCAGATCTACCCTGTGACTCAGC |
| NM_001321 | CACAACAGTGGCAATTCACGATGAAGAGATCTACTGCAAATCCTGCTACG |
| NM_001908 | AGTGTACCAACACGTCACCGGAGAGATGATGGGTGGCCATGCCATCCGCA |
| NM_005517 | AAGGGGCATATGTCACTAATAGAATGTCTCCAAAGCTGGATTGATGTGGA |
| NM_001909 | CCGCTGATTCAGGGCGAGTACATGATCCCCTGTGAGAAGGTGTCCACCCT |
| NM_014750 | CTTGATTCACCAGGTCTAAACTGCAGTAATCCATTTACTCAGCTGGAGAG |
| NM_004944 | CAAGGGCCTTCACCAACAGCAAAAAATCTGTCACTCTAAGGAAGAAAACA |
| NM_004089 | AGCCAGCGTGGTGGCCATAGACAACAAGATCGAACAGGCCATGGATCTGG |
| NM_004111 | GGTGAGACCACCAGCCACCTGATGGGCATGTTCTACCGCACCATTCGCAT |
| NM_006851 | TACGGACCAGGAGGGAATTACCCAACTTGGCCATATAAGAGAGGAGCCAC |
| NM_000405 | GAAAAAGCCATCCCAGCTCAGTAGCTTTTCCTGGGATAACTGTGATGAAG |
| NM_002110 | TCCGAGCTCTGGAGCGTGGATACCGGATGCCTCGCCCAGAGAACTGCCCA |
| NM_005524 | CAGTTTGCTTTCCTCATTCCCAACGGGGCCTTCGCGCACAGCGGCCCTGT |
| NM_002136 | GTCGTGGAGGTGGTTTCGGTGGGAATGACAACTTCGGTCGTGGAGGAAAC |
| NM_145904 | GCCACAGCCCCCTTGCCCTCCGCCTGGGATCTGAGTACATATTGTGGTGA |
| NM_005527 | GAGCAGATGTGTAACCCTATCATCACAAAACTCTACCAAGGAGGATGCAC |
| NM_007355 | GTGGTGCTGCTGTTTGAAACCGCCCTGCTATCTTCTGGCTTTTCCCTTGA |
| NM_004258 | GGTACGTGTCTCCAAAGTGTACTGGACCGAAAATGTGACTGAGCACAGAG |
| NM_002194 | ATTTGCCACAGTTGGTGTACCACGTGGAAAATGAGGGTGCTGCTGGGGTG |
| NM_000885 | CTTGTCCAAGACTGATAAGAGGCTATTGTACTGCATAAAAGCTGATCCAC |
| NM_002306 | TTCTGGGCACGGTGAAGCCCAATGCAAACAGAATTGCTTTAGATTTCCAA |
| NM_002348 | AGCCACAGAGGAGTCAGCTGCAAATATTCTCTTCTGTTCTACAGACCTCT |
| NM_005916 | AGAGTCTCTGGCTGACTACATCACAGCAGCATACGTGGAGATGAGGCGAG |
| NM_005520 | TGATGGGAGGCATGGGCTTGTCAAACCAGTCCAGCTACGGGGGCCCAGCC |
| NM_002397 | ACGATGCCATCAGTGTCTGAGGATGTCGACCTGCTTTTGAATCAAAGGAT |
| NM_014791 | CCTGGGTTTACAAAAGATTAGTGGAAGACATCCTATCTAGCTGCAAGGTA |
| NM_000918 | AACGGGGAACGCACGCTGGATGGTTTTAAGAAATTCCTGGAGAGCGGTGG |
| NM_002627 | GGGGGGCTCGCGGCCGGAGCTGATGCCGCATACATTTTCGAAGAGCCCTT |
| NM_006219 | AACAAAGATGCCCTTCTGAACTGGCTTAAAGAATACAACTCTGGGGATGA |
| NM_002654 | CGGAATCCCCAGACAGCTCGTCAGGCCCACCTGTACCGTGGCATCTTCCC |
| NM_000302 | GCTGGACCCTCATGCACCCTGGACGACTCACGCATTACCATGAGGGGCTC |
| NM_002674 | GGTCTGCCACTCAATCTGGCTATAAAAGGATATCAAGCACTAAAAGGATC |
| NM_002140 | AGATCGGATCATTACCATTACAGGAACACAGGACCAGATACAGAATGCAC |
| NM_002702 | TTATTGGAACCCTTCCATGGGTAGTGAACTCAGCTAGTGTGGCGGCCCCA |
| NM_002802 | ATATGACTCCAATTCTGGTGGTGAGAGAGAAATTCAGCGAACAATGTTGG |
| NM_005055 | CTCCGCCATGAGCATCATGACCGAGATCGGAAACCGCCTGGGGCAGGTGC |
| NM_015004 | ATGTCCCCTGCATTGTCACTCTGTGCAAGATTGGCTATCGGCATGTGGTG |
| NM_002970 | GTTGGTTTTGCCATGTACTATTTTACCTATGACCCGTGGATTGGCAAGTT |
| NM_005410 | AAACCTCCCATCTTTATGTAGCTGACAGGGACTTCGGGCAGAGGAGAACA |
| NM_003034 | GTCAGTTAGTGACAGCTAATCCCAGCATAATTCGGCAAAGGTTTCAGAAC |
| NM_005628 | GGCAGGACTCCTCCAAAATTATGTGGACCGTACGGAGTCGAGAAGCACAG |
| NM_004955 | TCCAGCCGTGACTGTTGAGGTCAAGTCCAGCATCGCAGGCAGCAGCACCT |
| NM_031844 | CTCAAGGCCGAGCTCATGGAGCGACTCCAGGCTGCGCTGGACGACGAGGA |
| NM_003091 | CGATTCCTCAGGGCCACGTTACCACAGACCTGTTTGTTTCTTATGCTGTT |
| NM_004780 | GCCCGCAATTTAGAGGGGACATACATGGCAGAAATTTAAGCAATGAGGAG |
| NM_005650 | CCGTGCCCTCTCCCCCCCTTGCAGAACAAGACCGCGAAAGGCAGCCTCAG |
| NM_003249 | AAGCTGCATCCTGAGACCCGGCGGTTCCGAGGATGCCAGCGCCATGCTGA |
| NM_148968 | AGGTGACATGGTCCTGGGACCAGTTGCCCAGCAGAGCTCTTGGCCCCGCT |
| NM_000074 | ATTTGAATTGCAACCAGGTGCTTCGGTGTTTGTCAATGTGACTGATCCAA |
| NM_016292 | TGGACTTGTTGACGACCCTAGGGCCATGGTGGGCCGCTTGAATGAGCTGC |
| NM_021643 | CATCCTTGGTTTTCTACAGATTTTAGCGTCTCGAATTCAGCATATGGTGC |
| BX436497 | AAACTGTTTTTTGGCAGTGGAACCCAGCTCTCTGTCTTGGAGGACCTGAA |
| NM_005347 | ATTGTTCAACCAATTATCAGCAAACTCTATGGAAGTGCAGGCCCTCCCCC |
| NM_003328 | GCTTAGGAAGGAAATGCTACTGAGTGTATGCCAGGATATATGTGAAGGAA |
| NM_007013 | CAAACTGGTGAATTGACAGTTGTGCTTGATGGATTGGTGATTGAGCAAGA |
| NM_021089 | AGCCGGCGGCGTGAACAATCCTCGAGCAGGAACTCACACCTGGTTCAGCA |
| NM_004310 | GGCGACTCTGCTGTGGGGAAAACCTCTCTGTTGGTGCGCTTCACCTCCGA |
| NM_016733 | CAGGACTGTCAACGAAACCTGGCACGGCTCTTGCTTCCGGTGTTCAGAAT |
| NM_002818 | CTCCAAGGAGACTCATGTAATGGATTACCGGGCCTTGGTGCATGAGCGAG |
| NM_005018 | GGAGTATGCCACCATTGTCTTTCCTAGCGGAATGGGCACCTCATCCCCCG |
| NM_002574 | CTGTTGGCCGCTCTGTGGATGAGACTTTGAGACTAGTTCAGGCCTTCCAG |
| NM_031966 | ATGCCACATCGAAGCATGCTAAGATCAGCACTCTACCACAGCTGAATTCT |
| NM_006854 | GCCTCTCATTTTTAGTTAATCACGATTTCTCTCCTCTTGAGATCCTCTGG |
| NM_006332 | GCGGAGAGCTCATGGAAGGCGAGTGGGAACTCGGCTGCCTGCCTTTTTTT |
| NM_004619 | GCCAAGAACGCCTACATTAAAGATGACACTCTGTTCTTGAAAGTGGCCGT |
| NM_016155 | GCCCACAATGACAGGACTTATTTCTTTAAGGACCAGCTGTACTGGCGCTA |
| NM_002659 | GAACGCTCACTCTGGGGAAGCTGGTTGCCATGTAAAAGTACTACTGCCCT |
| NM_000485 | TATTCAGGGACATCTCGCCCGTCCTGAAGGACCCCGCCTCCTTCCGCGCC |
| NM_006763 | TTGGGGAGGACGGCTCCATCTGCGTCTTGTACGAGGAGGCCCCACTGGCC |
| NM_001743 | ATCTCTTGGGCAGAATCCCACAGAAGCAGAGTTACAGGACATGATTAATG |
| NM_006191 | CCAATGGCCCCATGCGGATAACCAGTGGTCCCTTCGAGCCTGACCTCTAC |
| NM_176783 | ACTCAAATCTCTAAGTATTTCTCTGAGCGTGGTGATGCAGTGACTAAAGC |
| NM_002961 | GTAACGAATTCTTTGAAGGCTTCCCAGATAAGCAGCCCAGGAAGAAATGA |

TABLE 28

Polynucleotide probe sequences
for preparation of a large 30mer
nucleic acid array

| GenBank | |
|---|---|
| Accession Number | Polynucleotide probe |
| of Target gene | sequence (5′ to 3′) |
| NM_000246 | CAACAGGATTCACGGATCAGCCTGAGATGA |
| NM_005175 | TTGGCAGCTTGATCATTGGCTATGCCAGGA |
| NM_006559 | GGTGCAAAGATCTCTGTATTGGGAAAGGGC |
| NM_030666 | GGTAGCATCCTATTCTTGGGGAGATTTTCT |
| NM_003955 | TTCCTGGACCAGTACGATGCCCCGCTTTAA |
| NM_018209 | GATGATGGCTGGGACAACCAGAACTGGTAG |
| NM_001165 | GTGTCCTATTTGTAGGAGTACAATCAAGGG |
| NM_014670 | TTGCTGCCTTTACTACTCAAGGTCAGTCTG |
| NM_144578 | ATGCCTGGTGGCCCCCATTCTTACCATTAA |
| NM_144628 | GGCAGTGATGGGGCTGACAGTGGCACTTGG |
| NM_032263 | GGCGAGGCACTATGATACGGAGAGAAATTG |
| NM_006579 | ATGCTGTGAAGCACCTCACTCATGCCCAGA |
| NM_000877 | TTCATCTAAACACCAGTTACTGTCACCAGC |
| NM_002266 | TACACTTTCCAAGTTCAGGATGGGGCTCCT |
| NM_018462 | TTTACACAACACAGGCCACATGGGAAAGGC |
| NM_002444 | GGGCCGAGACAAATACAAGACCCTGCGCCA |
| AB032991 | CAGAAACATGTCTGAAAGTATGGCAGCTGC |
| NM_004762 | AAGAAGGTCTCCTCCACGAAGCGACACTGA |
| NM_000295 | GGTCTGCCAGCTTACATTTACCCAAACTGT |
| NM_030674 | CACACATCAGCAATCTCTCACCACTTCTTT |
| NM_022743 | GAATGCGACGCCAACATCAGAGCATCCTAA |
| NM_003217 | GGCTTCGTCCTTGTTGATACTCAACTCATT |
| NM_022366 | CTGTATGATGAAACCCTGGAAGATAGGTAG |
| NM_021109 | TCCACTGCCTTCCAAAGAAACGATTGAACA |
| NM_014268 | TTCAGAAGAACACGAGGGCCACACAGAAGA |
| NM_003352 | GAACAAACGGGGGGTCATTCAACAGTTTAG |
| NM_001923 | TGGCAGCGGTATGAAGCGAGAGGCCACTGC |
| NM_033503 | AAGCAGAGGTACAGATTGCCCGAAAGCTTC |
| NM_178155 | AACGGTCAAGTACCCCACATATCCTGAGGC |
| XM_088315 | TGTGCGTGGTCTCCAGGTTTCCCTATTACA |
| AK024458 | GCTGGGATCCATGGTTTCCTTACTACAATT |
| NM_014397 | AGAGACCTGACATCGGATACGTGCACCAGG |
| NM_005969 | GATGATGCGGAAATTAACCCCAAGGTGTAA |
| NM_002221 | GGGGCTCAATAACCTCGTCGACATCCTGAC |
| NM_013314 | CCCATGGTGAATAGATCAACCAAGCCAAAT |
| NM_004844 | GCTGACATAAAAATGGTGCAGATTGGCTGA |
| NM_001759 | CCTACAGACGTGCGGGATATCGACCTGTGA |
| NM_001987 | CAGATGAAATCATGAGTGGCCGAACAGACC |
| NM_002827 | GCTTACCTCTGCTACAGGTTCCTGTTCAAC |
| NM_004513 | GATGGACCTGTCACGATTGTCATCAGGAGA |
| NM_001237 | AAGTATCATGGTGTTTCTCTCCTCAACCCA |
| NM_172164 | GAGAATCAGCTGAAACGCGGAGCAGCAGTG |
| NM_000424 | TGGCTTCAGTGCAAGCAGTGGCCGAGGGCT |
| AB037771 | CCAAGCTCTCTTTTCCAGAGAGCAGTGGCT |
| NM_025113 | GACTGTTCAACATGCCTTATGATAACACCG |
| NM_032873 | GGACCAACTGGGGGCTTCAACTGGAGAGAG |
| NM_023037 | GACTCCAGTGTTTCTGGCACTAGTCTCTGA |
| AF509494 | CTTGAGTAAGACAAGTCTGGTGAACGAATG |
| NM_004556 | GCGGAATGTGGAGGATGAGACGCCCCAGGA |
| NM_002984 | GAGTACGTGTATGACCTGGAACTGAACTGA |
| BC025340 | CAGCTGTTGGGGAATTACCGATGCCTTTGA |
| NM_030926 | GCTCCTCATGAACGTGAAGAGGGGGACCTA |
| AF331856 | ACTATACTGACGTCTCCAACATGAGCCGCT |
| NM_000483 | AGGGACTTGTACAGCAAAAGCACAGCAGCC |
| NM_006931 | CCATCCTTCCTGCTATCCTACAAAGTGCAG |
| NM_001888 | CAAACTCATCTATGATTCCTGGTCATCTGG |
| NM_003804 | AGCAGCTTGATTTACGTCAGCCAGAACTAA |
| AB018263 | AACTCCACGCTCACTGCCTCGGAGGTCTGA |
| NM_006230 | TTCTCGGGCTTCGGGGCAGAGGACGATGAC |
| NM_006475 | CAATAACTGAAGTGATCCATGGAGAGCCAA |
| NM_001786 | GGGGATTGTGTTTTGTCACTCTAGAAGAGT |
| NM_031942 | TGAGATACAAGATGGAATGAGGCTGCAGTC |
| NM_001640 | AGGGCATGGAGTATTACCGTGCCCTCAAGA |
| NM_002483 | GTGGCCACCGTCGGCATCACGATTGGAGTG |
| NM_003915 | GCTCCGATTATGACAGTGACGGGTCACATG |
| NM_018842 | CCAGTGAGAAGCTTCAGTGGAGAGGCCTAA |
| NM_147180 | TATCCTTTGAGGAATTCAGTGCTGTGGTCA |
| NM_004924 | ACGGCCTTGTATGGCGAGAGCGACCTGTGA |
| NM_002276 | ATCACTACAACAATTTGTCTGCCTCCAAGG |
| NM_002695 | GTGAGACGGCTGGCAGGTACATCACCTACC |
| NM_003480 | CCTCCCTGTGAAAATGTGGATTTGCAGAGA |
| NM_002023 | CTCCAAGGCAATAGGATCAATGAGTTCTCC |
| NM_006216 | GTGTTATTCATGGGGCAGATAAACAAACCC |
| NM_021813 | TAAGTGTACAACTGACGAACAGCCCAGGAA |
| NM_006565 | GAAGACCAGAATACAGGTGCAATTGAGAAC |
| NM_005537 | CTTTCGGGCGCGGATTTATAGCAGTAGCAG |
| NM_004235 | CCTCGCCTTACACATGAAGAGGCATTTTTA |
| NM_006235 | GCGCTTAACCACACTCTCTCTGTGGAAGGC |
| NM_016269 | TGCATCAGGTACAGGTCCAAGAATGACAGC |
| NM_006164 | TTCTCCTAGTGAATACTCCCTGCAGCAAAC |
| NM_003222 | CCAGCTGATTCTAACAAAACCCTGGAGAAA |
| NM_000700 | GCCAAGCCATCCTGGATGAAACCAAAGGAG |
| NM_019846 | GAAACACGAAACATACGGCCATAAAACTCC |
| NM_032738 | AACAGCATCTGTTGTGGCTATCACAGTCCA |
| BC019046 | TACAGGAACATGATCGGACAGGGGGCCTAG |
| NM_016732 | ACCGGGACGACTTCTACGACAGGCTCTTCG |
| NM_002189 | GACTTGGAAAACTGCTCTCACCACCTATGA |
| NM_004827 | TGGGGCTTGTGGAAGAATCACGTGGCCTTG |
| NM_001830 | CAGGACCCCGAATCCATCATGTTTAATTAG |
| NM_020944 | GGACAGGGCCTATGTTTGGACCAAAGGAAG |
| NM_017784 | TGGAAGCCCAAATATTTTATCCAGGAGGGC |
| NM_002933 | CATATGTGCCAGTCCACTTTGATGCTTCTG |
| NM_022829 | TTGGCCAATGACACATTTCGGACCCTCTGA |
| NM_006399 | AACCTCATGTCAGCTCCCCGCGCTTCCAGC |
| NM_002893 | GAAGAGTCAGATGTCACGACATCCGAACTG |
| NM_003339 | CCTGAGATTGCTCGGATCTACAAAACAGAT |
| NM_005277 | TCCAAAGAGCGGCTCAATGCATACACATAA |
| NM_006820 | TTCTCATCCTCTCTGCACTGAGGCAGATGC |
| NM_024728 | CATCTTCAAGGATCAGCAAGGGTATTACAC |
| NM_025263 | CATCCAGGCGTCAATGGACCTCCTCTGTGA |
| BC046632 | GTGAACCTGAGCGACTCGGACAAGCAGTGA |
| NM_024713 | CCATCTTACTTTGGTTCCAGGATATACTGG |
| NM_014365 | CAGGACAGCCAGGAAGTCACCTGTACCTGA |
| NM_002947 | CCCTCAGTTTTATCCTTTAGGGATTGTGCA |
| AK092000 | CAGTGTACTGAACATACTGTATACCTCGTG |
| NM_022436 | CCAGCTCTTGTCATCCTAGGAATAGTTGTT |
| NM_002967 | ATCCCACACGGTGGCATGCAGGGCGGGTTT |
| BX647445 | CATAAGATTCCAGCTCCTTCAGGTGTTTGA |
| BC022095 | GTCTTGCGAGGACAGCCTCATAGAGAATGA |
| NM_006808 | CACATTTGGGGCAAGTACACTCGTTCGTAG |
| NM_031305 | CGAGAGAGGAAACACAATATGGATTCAGTG |
| NM_014792 | GTTTTCAGGCTGTATCCTTCTACCTCCTGA |
| NM_006304 | CAGTTACGAGCTGAACTAGAGAAACATGGT |
| NM_014686 | AGTGTGGGCCGCAACCAACGACTGCAGTGC |
| AB029034 | AGAGACTCGGCCGTATCCTGAAAATCCACA |
| BQ722784 | ACCCCAGATGGTGAAACGGCCCAAGCCAAA |
| NM_198243 | TAATTACGGAGCAGACACGAACACACGGAA |
| NM_016570 | CGTTTCAGACTTGGATCCTATAAACCTGTC |
| BC001077 | CGCGGTAGACGAGCGGATGCTGCGCTTTCT |
| NM_138379 | GAAGACGAAGACGGCCTTTTTACCCTCTAA |
| NM_024319 | TCTCGCAGGTGGCATGACAGAGGCTCTGAG |
| NM_015670 | GAGCTGTGTCACTGCAAACTCACTGTGTGA |
| NM_015436 | CAAGCTTTATACTTGCCGCTTGTGTCATGA |
| NM_001240 | CTCCTCGAGATCTGGCAATACAGACAAACC |
| NM_001261 | AACCAGACGGAGTTTGAGCGCGTCTTCTGA |
| NM_003095 | GCTTTGTCTGGACATCTGGGTGAAGTTTTA |
| NM_021102 | CGTCTGGAGCTCCGGAGATGACAAGGAGCA |
| NM_003133 | ACAGTCAACTAATGCGACTTATGGTAGCCA |
| NM_006819 | ATGGATGTGGGTCTGATTGCAATTCGGTGA |
| NM_032966 | TGTCGCGGCTCCTGACGAAGCTGGGCTGTA |
| NM_006284 | TGCCCTCAGCGAGTATGGCATCAATGTGAA |
| NM_005648 | GCTGATGGCTGCGAACTTCTTAGATTGTTA |
| NM_003199 | AAATGGACCAACTTCTTTGGCAAGTGGACA |
| NM_003299 | GAACATTGACCCTGATGCAAAGGTGGAAGA |
| NM_006758 | GCGTGACAGGAGGCGGTCGAGAGATCGTGA |
| NM_194259 | GAGAAAAGGGTCCGAGCACAAGCCAAGAAG |
| NM_003366 | CAGCAAGTGGAAATTTGGGACATACACCTT |
| NM_006004 | CGTGGCCCACAAACTCTTTAACAACTTGAA |
| NM_003374 | CACGCGCTTCGGAATAGCAGCCAAGTATCA |
| NM_007048 | TGACAGGTGGAAGTACCTGTGTTATTTCCA |
| NM_006761 | ACGGTGAAGAGCAGAATAAAGAAGCGCTGC |
| NM_005781 | AAGTGCTGGAGATGTTCGACTGGAACCTGG |
| NM_005243 | AGTACTCAGCCGGCAGCATAATGAAAAGTG |
| NM_003902 | GATCCAGCCAGTATAGAACTAGCTCTGTAG |
| NM_006769 | TGAATTCACTTCAGAGCAATCCACTACTGC |
| NM_004689 | AACCGCAGTAACATGAGTCCCCACGGCCTC |
| NM_006875 | TTGGCCTGGTCCTTGCTACCCTAAGCCTGG |
| NM_002953 | CACGTACTCCGCACTCAACAGCTCCAAGCC |
| NM_004965 | CAAAAGTGGAAGCGAAGCCGAAAAAGGCAG |
| NM_000592 | TGAGGCTGCTCTGGGGGCTGATCTGGGCAT |
| NM_178014 | TGAACGACCTCGTCTCTGAGTATCAGCAGT |
| NM_005742 | GCTTGATGACTTAGGGAAAGATGAGTTGTG |
| NM_001901 | AATCGCTGTACTACAGGAAGATGTACGGAG |
| NM_004907 | AGCGTCATCCGAAGTCGCCGATCGCCTGCA |
| NM_003746 | ACCGAAAGGCCGTGATCAAAAATGCGGACA |
| NM_001255 | TGGCGCTGTTTTGAGTTGGACCCTGCGCGG |
| NM_002417 | CTTTGGTGATTCCATTAATGAGAGTGAGGG |
| NM_006209 | TATGCTGCGGAAACTCGTCAGGACAAAATG |
| NM_002162 | ACGTCTATGCAGCCGACAGAAGCAATGGGG |
| NM_000587 | GCATCTCTGTCACCAGCATAAGGCCTTGTG |
| NM_031243 | GGTGGAGGAAACTATGGTCCAGGAGGCAGT |
| NM_003017 | CTCGTAGTCGATCTAGGTCAAATGAAAGGA |
| NM_004994 | CTACGTGACCTATGACATCCTGCAGTGCCC |
| NM_002966 | CTTCTTTTCCCTAATTGCGGGCCTCACCAT |
| NM_001345 | CCCCCCGCTCCACCAATTTCTTTGGCTTCT |
| NM_002497 | GGCTCAAGCCCTGTCAGATATTGAGAAAAA |
| NM_000545 | TGAGTCCGGGCTTCACACGCCGGCATCTCA |
| NM_006184 | TTCTCGAGCGGCTCCCTGAGGTTGAGGTGC |
| NM_000598 | TGTGGATAAGTATGGGCAGCCTCTCCCAGG |
| NM_006152 | CTCCGACACAATGGGCCACCACCAGTGTGA |
| NM_006274 | TCAGCCAAGATGAAGCGCCGCAGCAGTTAA |
| NM_002105 | TGTACACCGGCTGCTGCGGAAGGGCCACTA |
| NM_001428 | TCAATGTCATCAATGGCGGTTCTCATGCTG |
| NM_002415 | AACTATTACGACATGAACGCGGCCAATGTG |
| NM_003234 | GGTGACGTTTGGGACATTGACAATGAGTTT |
| NM_001728 | AAGAACGTCCGCCAGAGGAACTCTTCCTGA |
| NM_002460 | CAGATCTATCCGCCATTCCTCTATTCAAGA |
| NM_003403 | AACATCTGCACACCCACGGTCCCAGAGTCC |
| NM_001344 | GTTTGCCTGAGAATACAGATCAACCCACAG |
| NM_002648 | GATAGGCCAACCTTCGAAGAAATCCAGAAC |
| NM_006585 | GCTATCAAACTCGCTACTAATGCTGCAGTC |
| NM_001826 | ACGAGGAGTTTGAGTATCGACATGTCATGC |
| NM_002466 | CACACATCTCGGACCCTCATCTTGTCCTGA |
| NM_005582 | CTGTGGGATTACAGCCATAGGCATTTTCTT |
| NM_001831 | GCAGGAATACCGCAAAAAGCACCGGGAGGA |
| NM_000038 | AGAGAGGCAGGCGTGAAATCCGAGTCCTTC |
| NM_007295 | TTGCAAGGTCTTACTCTGTTGTCCCAGCTG |
| NM_001226 | CGCAGGTTTTCAGATCTAGGATTTGAAGTG |
| NM_033357 | TGGATGCAGGTACAGTAGAACCCAAAAGAG |
| NM_005190 | GAAGTCAGAACTCTAGCTACAGCCAATCTT |
| NM_001795 | GACTGGGGACCCAGGTTTAAGATGCTGGCT |
| NM_001848 | AGACGATAACAACGACATTGCACCCCGAGG |
| NM_004380 | CAGCCGTTTACCATGAGATCCTTATTGGAT |
| NM_005215 | CCAATGTGTATGAACAGGATGATCTGAGTG |
| NM_004948 | TGGAGTTTCTAGATCACCTGGAACCCAAAT |
| NM_001397 | TGCTGTCGGCGCTGGGGATGTCGACGTACA |
| NM_004448 | CATTGACGAGACAGAGTACCATGCAGATGG |
| NM_001982 | TTCCCCAAGGCTAATGCCCAGAGAACGTAA |
| NM_006137 | ACGAGGACATGTCGCACAGCCGCTGCAACA |
| NM_005245 | AGAGGTGACGATCCCGCCCCTGGATTCCCA |
| NM_004119 | TCTCCGCAGGCTCAGGTCGAAGATTCGTAG |
| NM_182925 | GATAGAGAGCAGGCATAGACAAGAAAGCGG |
| NM_000629 | CAGTTCCCAAACTAGCCAAGATTCAGGAAA |
| NM_001552 | TGTGGACCGGAAGACGGGGGTGAAGCTTCC |
| NM_000572 | GGCTACGGCGCTGTCATCGATTTCTTCCCT |
| NM_000640 | GCCAAACACCTACCCAAAAATGATTCCAGA |
| NM_000564 | CCACTAACTATGAGGTCCTCTGCATTTTCA |
| NM_176786 | CTCAGCAAGGCTCGGTCCTGGACATTCTAG |
| NM_000213 | ACTAGGCCTGGCCGGAGATGTGGCTGAACG |
| NM_001967 | GACCCAAGCACTAGTATTGGCCCCCACCAG |
| NM_004933 | TGTATGGGCACCCGTGCGGGTTGGAGTACG |
| NM_000224 | CACCAACTACCGGTCCCTGGGCTCTGTCCA |
| NM_145110 | CCAGCATGCCCCAGTCCAAAGGAAAATCCA |
| NM_002758 | CTACATACCCAGAGCTAATGCAACATCCAT |
| NM_002412 | AAGCCAGGCTTGGGAGGGAGCTCAGGTCTG |
| NM_004530 | AGCATCAAATCCGACTGGCTAGGCTGCTGA |
| NM_002422 | CTTTCCAGGGATTGACTCAAAGATTGATGC |
| BC063294 | GAGCTTTTCCTTGCAGGAGCGTCAGTTGCG |
| NM_004557 | CCTCCAAGAAATGCCCATAAACCAAGGAGG |
| NM_002514 | CACACCAACTGTCCTAAGAACAATGAGGCC |
| NM_000300 | CACTGCAGAGGGAGCACCCCTCGTTGCTGA |
| NM_001276 | GGCCAGGATCTGCGCTTCCCTCTCACCAAT |
| NM_000535 | GCCAACCTGGGTGTCATTTCTCAGAACTGA |
| NM_015869 | GTGCAGCTACTGCAGGTGATCAAGAAGACG |
| NM_002805 | TGACACCCAATTGCCGGGTGGCTCTAAGGA |
| NM_000314 | CCACTGACTCTGATCCAGAGAATGAACCTT |
| NM_002868 | CAAAGAGTGAACCCCAGAATCTGGGAGGTG |
| NM_002901 | GCTACCAATTACGGGGAAGATCTCACAAAA |
| NM_003821 | CCGGAAATACTTGTGGTTTCTAGATCACCA |
| NM_005617 | ATCCCCTCTGACAGCACTCGCAGGAAGGGG |
| NM_014624 | TTGATCTACAATGAAGCCCTCAAGGGCTGA |
| XM_044622 | GATTGAAGGACCTAGTGTGAGCATAATGGA |
| NM_000602 | GGAACAGTCCTTTTCATGGGCCAAGTGATG |
| NM_003012 | TGCCCCACCTTTCAGTCCGTGTTTAAGTGA |
| AF311912 | ATCACCTCGGTGAAGCGGTGGCAGAAGGGG |
| NM_139276 | ACCTCGGAGTGCGCTACCTCCCCCATGTGA |
| NM_003220 | AGCCACACGGACAACAACGCCAAAAGCAGT |
| NM_003225 | ATCCTAATACCATCGACGTCCCTCCAGAAG |
| NM_003842 | AAGAATCAGGTACAAAGCACAGTGGGGAAG |
| NM_000546 | CTCCCGCCATAAAAAACTCATGTTCAAGAC |
| NM_138764 | GGTCTATAATGCGTTTTCCTTACGTGTCTG |
| NM_001328 | GATAGAGACCACGCCAGTGACCAGTTGTAG |
| NM_058197 | GGAGTTTTCAGAAGGGGTTTGTAATCACAG |
| NM_000594 | CCCAGGGACCTCTCTCTAATCAGCCCTCTG |
| NM_003810 | CAGTTTTTTCGGGGCCTTTTTAGTTGGCTA |
| NM_002609 | AGGTTGCTGACGAGGGCCCACTGGAGGGTT |
| NM_001069 | CACGGCCGACGAACAAGGGGAGTTCGAGGA |
| NM_003005 | ACAAACGCTGCATTTGACCCGAGTCCTTAA |
| NM_002985 | AAAGAACCGCCAAGTGTGTGCCAACCCAGA |
| NM_000964 | GCATATGTTCGGGGATTTGGTGTGCAGTTG |
| NM_024408 | CACATGTCTGAGCCACCACACAACAACATG |
| NM_001465 | GAGAGAAACCTAAAGTCTCTGACTCAGACA |
| NM_001618 | GACCGGGATTTCATCTGGTGTGATAGACAC |
| NM_004322 | TCCAGTCCTGGTGGGATCGGAACTTGGGCA |
| NM_021960 | TAGTTAAACAAAGAGGCTGGGATGGGTTTG |
| NM_004383 | TGAGCACATCAAAACCCACGAGCTGCACCT |
| NM_015583 | TGGAGGGAGGTTTTCAGCCCTGGTATATGA |
| XM_373407 | TGTCGGGGAGTACCTTCAACTGGCCCTACG |
| NM_016734 | GCTCCCCCTACTATTATAGCGCTGCCGCCC |
| NM_000808 | GCCACATATGTCAACCGGGAGTCAGCTATC |
| NM_002964 | GGCTGGCAGCCCACAAAAAAAGCCATGAAG |
| NM_002965 | AGAAGATGCACGAGGGTGACGAGGGCCCTG |
| NM_001250 | AGAGAGTCGCATCTCAGTGCAGGAGAGACA |
| NM_003407 | GACTCCCCATCTTCAATCGCATCTCTGTTT |
| NM_003674 | GAGGGCCAGAGCAAGCGCTGTAAACCCTGA |
| NM_078467 | CTCCAAACGCCGGCTGATCTTCTCCAAGAG |
| NM_006145 | ATCAAGAACCGTACTTGAGCAGGTTCTTCC |
| NM_000122 | CACCCGCTCTTCAAGCGCTTTAGGAAATGA |
| NM_006712 | ACCCTTCGAGGAACTGGAGTCCCAGAGAGG |
| NM_000175 | TTGCCCTGTCTACTAACACAACCAAAGTGA |
| NM_000162 | ATGCTGGACGACAGAGCCAGGATGGAGGCC |
| NM_000852 | CTCCCCATCAATGGCAACGGGAAACAGTGA |
| NM_005526 | CCCAAAGCCAAGGACCCCACTGTCTCCTAG |
| NM_001540 | GCAAAATCCGATGAGACTGCCGCCAAGTAA |
| NM_002432 | AAACTGGTGTGTGGAAGTCACAGCTTCATC |
| NM_004146 | AAGGCGGCAGAGTTGGCCAAAGGCCAGGGA |
| NM_002505 | GTCCAGACCCTCCAGGTAGTCCAAGGGCAG |
| NM_002511 | CACAGCATGAAGCAGGAAATGGCAATGTGA |
| NM_006170 | GCCTTCTCTACTGTGCATACCCATGAAATT |
| NM_002910 | AAAGGCTGCTTCCACGTGCCGCGGTGCCTA |
| NM_005281 | TTCCGATCCCGCTCCCCCAGTGATGTCTAG |
| NM_005981 | CCTAGAGCCAACCCCAGTGCCTTTCTATGA |
| NM_003410 | AAAGTGGATGGCACTTGCCCTGAGGTCATC |
| NM_007146 | TGCCTTTCTTGCCCCAAGCTTTGCCTACAT |
| NM_002419 | TTGATCCCTGGAGCTTTGTGTCAGCTGGGC |
| NM_001197 | TGAGGTTCTGGAGATCCCCGAACCCCGGGT |
| NM_000418 | CTCCGTGGGACCCACATACATGAGGGTCTC |
| NM_006254 | CAAGAGGCTGGGAATGACGGGAAACATCAA |
| NM_002166 | CACGGATATCAGCATCCTGTCCTTGCAGGC |
| NM_033306 | CCACCATAGAACGACTGTCCATGACAAGAT |
| NM_020250 | ACAGGTGTCTGTATTGCTCTACCTACCTAA |
| NM_000249 | CCTGGCTCCATTCCAAACTCCTGGAAGTGG |
| NM_002228 | TGATAATCCAGTCCAGCAACGGGCACATCA |
| NM_001654 | CTACTCAGCGCAGCCCGCCTTGTGCCTTAG |
| NM_004047 | TTGGGGTCATCGTCGCAATTCTTCAGACCT |
| NM_000729 | AGTGCCGAGGAGTATGAGTACCCCTCCTAG |
| NM_006273 | ACTGTCCCCGGGAAGCTGTAATCTTCAAGA |
| NM_004073 | GCTTGTACTTACCTCGCTTCCCACCTTCGG |
| NM_006268 | TCTCACCCCGTCCATGTCTGAGCCCCCTGA |
| NM_002104 | AGCAACCTTGTCCCGCCTCATACAAATTAA |
| AK127132 | AGTGGGTAAAGACCATACGTTGGAGGATGA |
| NM_004422 | TGGCCATGGGCAATCCCAGCGAGTTCTTTG |
| NM_006014 | TGCCGAGCCCCACCAAAGGGTGGTTGGGAA |
| NM_003824 | GTGACCTCCAGAACAGGAGTGGGGCCATGT |
| NM_002055 | GAGAGGTCATTAAGGAGTCCAAGCAGGAGC |
| NM_005313 | AGCTACAAACCCCCCTGTAATTCAAGAAGA |
| NM_001513 | CCAGATACACCCACTGAGCTGAGGGCCTAG |
| NM_003883 | GCCAAGACCGTGGCCTATTTCTACGACCCC |
| NM_005339 | ACCCATTTAATCCCCCTAAGGTCCGGTTTA |
| NM_003549 | AGGGCCCCCTTCAAAAAGCCTGCTGGAGAC |
| NM_004763 | CTCTGAAGACCACAGATGCAAGCAATGAGG |
| NM_002301 | GCGGAATGGTGTCTCAGATGTTGTGAAAAT |
| NM_004993 | CTGACATACGAGCTCCATGTGATTTTTGCT |
| NM_002790 | CCTGGCCAGAATTTCCACATGTTCACAAAG |
| NM_002971 | CGGTTTAGAGGTCGATGTGGCAGAATATAA |
| NM_003769 | CACTACTTCTCTCCTTTCAGGCCCTACTGA |
| NM_005835 | CCACCAGGAAAGGTCCAGATTTCTGTTCAT |
| NM_181314 | CCCACGTCTGGCCTTCTGTCCACTGTGCTG |
| NM_003262 | ATCGATCCCAGCACAGTAGTGGAAATGGAA |
| NM_006497 | GGGACCATCGACCGTTTCTCTCCCACCTAG |
| NM_007117 | CTGAAAAACGCCAGCATCCGGGCAAGAGGG |
| NM_006759 | TCTGGAAACCTTCGCATCTTGGACCACTGA |
| NM_014232 | ATCTTGGGAGTGATTTGCGCCATCATCCTC |
| NM_006299 | AGCTTTAATCGACACTGCAACCTCATTCGC |
| NM_000072 | CAGTGTTGGTGTGGTGATGTTTGTTGCTTT |
| NM_002211 | CCAAACTACGGACGTAAAGCTGGTCTCTAA |
| NM_004242 | AGGAAGGTACTGCACCATCTGAAAATGGTG |
| NM_005589 | GCTGTTGTCATGCCTACCATGGGCCGTTAG |
| NM_022067 | TCCAGTCCCTTTCTGATGCTCTGTCAGACA |
| NM_001752 | AGTCCGGATCTCACTTGGCGGCAAGGGAGA |
| NM_001793 | TGTTCGACTATGAGGGCAGCGGCTCCGACG |
| NM_003159 | GACATACCATGAGAATGCGGCACTGACGGG |
| NM_156039 | CCCAGGCGATCTGCATACTTTAAGGACCAG |
| NM_004941 | AGAATATCTCGAGCTTTCCGACGGCGCTGA |
| NM_021071 | CATCTCTCTCCTTTTTGACCAGTGTCATCA |
| NM_005665 | AACAGAAGACAGTGTGCTGGAGACCAGAGA |
| NM_004475 | ATCAAGAAGGCCACTGGTGTGCAGGTGTGA |
| NM_002133 | ACAGTTGCTGTAGGGCTTTATGCCATGTGA |
| NM_004125 | GGCTGGCGTGGAGAGGATCAAGGTCTCTCA |
| NM_002102 | GGCTCGTGTTATTTTTGAGGTGATGCTTGT |
| NM_005318 | TCCAGTGCCAAGAGGGCCGGCAAGAAGAAG |
| NM_002108 | CAACAGCCTTTTCACTGCAATTTCTGCACA |
| NM_006644 | CCCCTTCACCTGAACTTACCTCAGAAGAAA |
| NM_181430 | GCCAGCTCAGACTGGAGTTGCCTCAGTTGA |
| NM_014780 | AGATTCGCTCCCGGGGTGTGCCCTATGCCT |
| NM_000917 | GGAAAATTGACCACAGCACAGTACAGAGTA |
| NM_000869 | CCCACCTCCTGCATGTGTCTCTTGCCTCTG |
| NM_006218 | CATGGTGGCTGGACAACAAAAATGGATTGG |
| NM_005084 | GGGACCAACATTAACACAACCAATCAACAC |
| NM_002890 | CGCTCCTCCAACTAACCAGTGGTATCACGG |
| NM_134269 | GAAGGGGCTGGTAAAAACCAAAAAGTCCTA |
| NM_003242 | GAAGACGGCTCCCTAAACACTACCAAATAG |
| NM_003451 | AATGCACAAGCGAATCCACAATGGCCAGAA |
| NM_019841 | ACTGAACCTTAGTGAGGGGGATGGAGAGGA |
| NM_000416 | GCTGCTTTACTACTCTTTCTAGTGCTTAGC |
| NM_003177 | GTCAGCGGGTGGAATAATCTCAAGAATCAA |
| NM_000277 | CCAGCAGCTTAAGATTTTGGCTGATTCCAT |
| NM_053056 | TGATCAAGTGTGACCCAGACTGCCTCCGGG |
| NM_000873 | GTGTTGCTGTCCCTGTTCGTGACATCTGTC |
| NM_001092 | AGGTTCTGGAGGACGAAGATGTGTTTCTCC |
| NM_004454 | CCCACTTTGAAGACAGCCCCGCTTACCTCC |
| NM_005225 | CTCATCCCTCACCACAGATCCCAGCCAGTC |
| NM_001760 | CCTACAGATGTCACAGCCATACACCTGTAG |
| NM_004064 | GACGGTTCCCCAAATGCCGGTTCTGTGGAG |
| NM_000075 | CTACATAAGGATGAAGGTAATCCGGAGTGA |
| L27560 | TCACTCCTGAGAGGGCTCCGGCCCAGAATG |
| NM_002467 | CTTGTTGCGGAAACGACGAGAACAGTTGAA |
| NM_001175 | CTGTCGATTAAGAAGGAGTGGACAGAATGA |
| AB007921 | GGTGCCTGGGATTTTGACTGGGAGATATAG |
| NM_000724 | TAAATACATTATTCCTGGGGGTTCGGCAGA |
| NM_002987 | TGCTCCAGGGATGCCATCGTTTTTGTAACT |
| NM_001803 | CTTCGTGGCCAATGCCATAATCCACCTCTT |
| NM_014376 | AGACCAGTGCTCACTATGAAGAGAACAAGT |
| NM_182908 | TTGCGGTGGCAGGCTACTCCACTCGGCTCT |
| NM_004434 | ACAAGCATCATGCAGTGGCGCGTCATTTAG |
| NM_014210 | GCTCACAGCTACAAGGGAAAGAAAAGATGA |
| NM_013451 | CAGCCCAACATTTCCAGATACTACCTGCGT |
| NM_003088 | TTCGAGTTCTGCGACTATAACAAGGTGGCC |
| NM_000156 | ATCATGTTTGAGGAGACGCAGGTGCCCGCG |
| NM_002048 | TGAGGACTACGATGACGAGCAGCGCACCGG |
| NM_002051 | TGGACCACACCACCCCTCCAGCATGGTCAC |
| NM_000169 | ATCCCACAGGCACTGTTTTGCTTCAGCTAG |
| BM722299 | GTGGTTCACAACGACAGGCTACTGAGCACC |
| NM_002224 | CAGGCAACGCCTAGGCTTTGTGGATGTCCA |
| NM_005335 | CTTCCCTGCAAATTATGTCAAGCTTCTGGA |
| NM_002167 | CGGAACTTGTCATCTCCAACGACAAAAGGA |
| NM_004633 | TGGATGCACAGACGGTGCAAACACAGAACT |
| NM_015187 | TACTATCGCCTTCGCAGTCTGCACCCCGCC |
| NM_015196 | AGAGACTCGAGTTACTGTGGGAATGTGTGA |
| NM_005556 | GAAGGCTTATTCCATCCGGACCGCATCCGC |
| NM_005356 | CCCATAGTCCGACTGGATGGGAAGGGCAGG |
| NM_005933 | ACTGGGGCAAGAACGGAGTTGCTTCTATAA |
| NM_005098 | GACTGGAACTCACTTGATGGGATTATTCGT |
| U50748 | GCCTCAATTCCAAACTTGTTCTACTCAGAC |
| AB033114 | TAGGAGAAGCACTGTTGTTTTCCACACAGT |
| NM_002499 | CCCACCTGGAAGGACTAATGAAGGACCTAA |
| NM_004289 | CTTGATAGTACCCAAAGAACTGGTGGCCTC |
| NM_005654 | TTCAACTGGCCTTACATGTCCATCCAGTGC |
| NM_020992 | TATGAAGTGGTCACTGTGTTCCCCAAGTGA |
| NM_003311 | TGAAATCCCCCGACGAGGTGCTACGCGAGG |
| NM_002661 | CAGTGTTAATGAGAACCACTCCAGCTGTAC |
| NM_015568 | AAGGTGCATGGCTGTTGCCGTATCTCCTAG |
| NM_006115 | GTGGGGACAGAACCTTCTATGACCCGGAGC |
| NM_080588 | TCCAGACGGCAGAGCAGTACCAGTTCCTGC |
| NM_021038 | CGGCTGTCAAATCACTGAAGCGACCCCTCG |
| NM_006498 | GCGTAAGGGGCGGGTTCAACATGTCCTCTT |
| NM_014904 | AGGGTAATGGAAGAAACGCCCAGTATTCTC |
| NM_002972 | TCTCGTTACCGACCACTAGGGGTGGCAGGG |
| NM_006142 | TGGAGACTGAGCTCCAGGGCGTGTGCGACA |
| NM_003569 | AGTCTCATCATATGGGGATTGAACCACTGA |
| NM_015055 | ACCCTCACCTGATCACTAACTGGGGACCTG |
| NM_015173 | ACCTTAGAACTGGAGCGGTCGGCCCTGCTG |
| NM_016021 | GCATTGGCAGCTCTTATATTCCGACGAATA |
| NM_005573 | GAGGAGGTTGCTCAAAGAAGTACAGTCTTT |
| NM_031407 | TCCCCTTTCCATGCCGTCCATGATCCCCAC |
| NM_004665 | GACCAGCAATTCAGCAATAACTTACCTGCT |
| NM_001783 | AGGAGGGCAACGAGTCATACCAGCAGTCCT |
| NM_000626 | ACAGAGCTGCGAGTCATGGGATTCAGCACC |
| NM_006762 | CAGATTGATCAAGTGCATGAACTCGGTGGA |
| NM_002838 | CACCATCACAGCGAACACCTCAGATGCCTA |
| NM_173216 | CTGCCTGGCTTCCGGACCATTCACTGCTAA |
| NM_002163 | GCCTCACACCAGAGATCATTTTTCAGAGAA |
| NM_002339 | GGAAGTATGAGAAGGTGCTTGTGGAAGGGG |
| NM_152866 | CCTCACCAATAGAAAATGACAGCTCTCCTT |
| NM_006495 | CTCTATTCCTCCCAACTCTGATCAAGATCT |
| NM_005246 | ACCTGAAAATCGCCCTAAGTTCAGTGAACT |
| NM_000698 | AGCCAGTGGTTCGCCGGCACTGACGACTAC |
| NM_004271 | CTGAAAAACGGTCCACCGTGGCCTGTGCCA |
| NM_001715 | GATGAGCAACCCCGAGGTCATCCGCAACCT |
| NM_003254 | AACTGCAGAGTGGCACTCATTGCTTGTGGA |
| AK090461 | TCCCGACGGTGGGTTTGTTCTACTGGGGCC |
| NM_004071 | CTCTCAGAGAAGCCTTAAAGCATCCTTTCT |
| NM_000757 | CGTTCCTTTGACTGACACAGGCCATGAGAG |
| NM_020548 | TCTGCCAATCCGGGCACTGGGACAGAGGCT |
| NM_005232 | GAGGCTGGTCTAATTTTCCTTCCCGGGAGC |
| NM_002017 | ATCAATCAGCCAGTGAGGGTCAACGTCAAG |
| NM_000206 | CCATGTTACACCCTAAAGCCTGAAACCTGA |
| NM_004559 | GCTGAGAATTCGTCCGCTCCCGAGGCTGAG |
| NM_021103 | ACGCAGGAGAAGAACACCCTGCCGACCAAA |
| NM_138933 | GCAGTCCATCATTTTGCAAACTTTGCTGGA |
| NM_001614 | TGGAAGAAGAGATCGCCGCGCTGGTCATTG |
| NM_005919 | AAGACCTTCCCCTATCCCTTGCTCCTCGCC |
| NM_000026 | TCTTTCACTGGTCGTGCCTCCCAGCAGGTG |
| NM_000687 | CCCTTCAAGCCGGATCACTACCGCTACTGA |
| NM_001621 | CCTGATTTGACATCCAGTGGATTCCTGTAA |
| NM_001647 | TTGGCAAGAAACCCTAATCTCCCTCCAGAA |
| NM_001664 | CAAGCTAGACGTGGGAAGAAAAAATCTGGT |
| NM_152862 | ATCACGGGGAAGACGTTTTCATCCCGCTAA |
| NM_005171 | TCAGACTAGCAGCGGACAGTACATTGCCAT |
| NM_001519 | GTGTCATACCACGCCGACGAGGAGGCTGAC |
| NM_000900 | GCCATGGTTTATGGATACAATGCTGCCTAT |
| NM_001746 | AGAAGATGGTGGCACTGTCAGTCAAGAGGA |
| NM_004347 | ACCATAGAACGAGCAACCTTGACAAGAGAT |
| NM_005201 | CGTTCCTCCAGCGTAGACTACATTTTGTGA |
| NM_000560 | GACAAAACCAGCCAGACCATAGGGCTATGA |
| NM_004356 | AGGAGGACTGCCACCAGAAGATCGATGACC |
| NM_001769 | GCTATCCGCAGGAACCGCGAGATGGTCTAG |
| NM_001827 | GAGTCTAGGCTGGGTTCATTACATGATTCA |
| NM_000397 | TCTCCAACTCTGAGTCTGGCCCTCGGGGAG |
| NM_004728 | GAAGCGGAGTTTCAGTAAAGCATTTGGTCA |
| NM_021907 | ACAAGGTACGAGGAGAAACCTCCGCAATGA |
| NM_006169 | AAGGACTTTTCTCCCTGGTGGCGAGGAAGC |
| NM_004416 | TGGCAGGGATGACCGGGATACTGCTGTGCG |
| NM_001948 | CTTACGTCTCTGCTTCGCTCAGCGATGCAA |
| NM_001951 | CCCCGGCAGATGACTACAACTTTAATTTAG |
| NM_001961 | TCCTGCCCGGAGACCCCTTCGACAACAGCA |
| NM_001412 | CATACGGCGAGCTTCCAGAGCATGCTAAAA |
| NM_003752 | AAACGAGGGCTACATGCGCCGCGGTGGCTA |
| NM_001436 | ATGCCGTGGTCGTGGGAGTGTACAGGCCAC |
| NM_005252 | AGCTGCACTGCTTACACGTCTTCCTTCGTC |
| NM_000146 | TTCGAAAGGCTCACTCTCAAGCACGACTAA |
| NM_012197 | ACCGGGGTTCAAGGGAAAGAGACTTGCTGA |
| NM_000435 | GCCGGAAGTTACCCCCAAGAGGCAAGTGTT |
| NM_005890 | GACGATGTTTCTTGCCTCTCTCCCCAGAAC |
| NM_002065 | ATGAAACCGGCGATGAGCCCTTCCAGTACA |
| NM_002080 | CTCCAGCAACGTGGGCTACCTTGCCCATGC |
| NM_002092 | GGTCCCACGTTCATCATAGGTATATTGAAC |
| NM_004493 | GTGATGACCATTGCCCCAGGTCTGTTTGGC |
| NM_004964 | GACAAACGAATTGCCTGTGAGGAAGAGTTC |
| NM_004494 | CCAGGCATCAGAGATCATGAGAGCCTGTAG |
| NM_002129 | GCTGCATATCGTGCCAAGGGCAAAAGTGAA |
| NM_031266 | GCCCCGGCTACGACTACAGTCAGGGTAGTA |
| NM_014413 | GATGACGGAAAGGATGGGGGCGTGGGATGA |
| NM_002568 | CGCCCAGCTGCTCCTAGACCACCATTTAGT |
| NM_198336 | ACATAGGACGACAGTTAGCTATGGGTGTTC |
| NM_000212 | TTCACCAATATCACGTACCGGGGCACTTAA |
| XM_290793 | AGCGGGGAAGGAATGAAGCGTGTCCTGACT |
| NM_005956 | TCTGTGGCCAGTGAAATTATGGCTGTCCTG |
| NM_005962 | ACGCCTCTTCATTCCCGTCCATGCCGAGCC |
| NM_000265 | ACCAAGCGGAAGCTGGCGTCTGCCGTCTGA |
| NM_005601 | ATCCTCTTGCTCTGTACAGGTGCCCTGAGC |
| NM_002512 | GTCTTGTGCTCATGACTGGGTCTATGAATA |
| NM_000270 | AGCATTCCACTCCCTGACAAAGCCAGTTGA |
| NM_004152 | CTACACGTTCGAGAGAGAGTCTTCGGGAGA |
| NM_001604 | CCCATGCAGATGCAAAAGTCCAAGTGCTGG |
| NM_002541 | AAGCCAAGACTTCGGACCACCATCAGCCGC |
| NM_013232 | TACCTGTCCATGGTCTTCAGTATCGTATGA |
| NM_000291 | CCTGGGGTGGATGCTCTCAGCAATATTTAG |
| NM_021129 | AGACGTGGATAAGTGGTTCCATCACCAGAA |
| NM_001198 | GCCACCAACAGTGAAGAGGTTATTGGAGTG |
| NM_006406 | GGAAACCTGGTAGTGAAACAATAATCCCAG |
| NM_002836 | TTCAGGTAATTCTGACTCGAAGGACAGAAG |
| NM_002871 | GTGGCCTTGGAACGAGTTTCCCATGAGTAA |
| NM_002881 | TCAGCGAAGACCCGGGCCAACGTGGACAAG |
| NM_005777 | GCTGTTCGAAGAGTCATGTTTGCTCGATAT |
| NM_004851 | CTTCTTGGGGACGTATGTGGCCGTCTTCGA |
| NM_004159 | GCTGCGCCTTTAGATGACACGACCCTACCC |
| NM_002923 | CAAATCACCACAGAGCCTCATGCTACATGA |
| NM_000976 | AGTGGTGCTGTGGAATGCCCAGCCAGTTAA |
| NM_000980 | CGCTACGAGAGTACAAGGTAGTGGGTCGCT |
| NM_000983 | ACTGGTTGCGCGTAGTTGCTAACAGCAAAG |
| NM_000969 | AGAAGAAGGATCGGGTAGCTCAAAAGAAGG |
| NM_000970 | CGATCTGTGTTTGCTCTGACGAATGGAATT |
| NM_000661 | CTTGTTCAGTATCTCAAGCCCAGAAAGATG |
| NM_002951 | GTTGGCCCTGACAATCATAGCCAGCACCTG |
| NM_001014 | TGGAGGGTGAGCGACCTGCGAGACTCACAA |
| NM_001021 | CTTTTGGACTTCGGCAGTCTGTCCAACCTT |
| NM_001028 | ACCAGAAATACCAAGGGTGGAGATGCTCCA |
| NM_001031 | TCAGAGCGAGAAGCCCGGAGGTTGCGCTGA |
| NM_001007 | GAGACAAAAGACTGGCGGCCAAACAGAGCA |
| NM_001009 | CAAGGGCTCCTCGAACTCCTATGCCATTAA |
| NM_001011 | CGGGCAAGGATGTTAATTTTGAATTCCCAG |
| NM_001013 | GTCCTTCATTGTCCGCCTGGATTCCCAGAA |
| NM_003011 | CACGACGGGGCCGACGAGACCTCAGAAAAA |
| NM_006427 | GTGGGCAGATGCTGATTGGACCAGACGGCC |
| NM_001636 | CATGTACACGGGCACCGTCGACTGTTGGAG |
| NM_006516 | CATCCCCTGGGGGCTGATTCCCAAGTGTGA |
| NM_002860 | TTACTACTAAGTGGCTGCTGCGAGGGAAGG |
| NM_003134 | TAGAGCTAACATGGATGGGTTGAAGAAGAG |
| NM_006280 | CTTGGCCTTCAGTGCGAAGAGCCACATCCA |
| NM_003153 | CCACATGGACCTAAGGGCCAACCCCAGTTG |
| NM_005801 | GACGATCAGCTGAAGGTTCATGGGTTTTAA |
| NM_003258 | CAGATTCTGCAATGCAGCCCTGCCAACTGA |
| NM_014220 | CATATGTGGCTTTTGCTGCTCTCACCAACA |
| NM_003318 | GGTGGTGAAAGTCATAATTCTTCATCCTCC |
| NM_006000 | AGGTGGGCATCGACTCCTATGAGGACGAGG |
| NM_006009 | GCGTCCAACCTATACTAACCTGAATAGGTT |
| NM_006002 | GCGACCCTGATGAACTAAGATTTAATGCGA |
| NM_006508 | GCTGAGTTGCCCAAGGCCCAGATCAGCTGC |
| NM_000375 | AGTTTGCAGCCATCGGCCCCACTACGGCTC |
| NM_003380 | GAAACTTCTCAGCATCACGATGACCTTGAA |
| NM_000377 | GGAGCGCTTTTGGATCAAATCCGGCAGGGA |
| NM_005080 | AGACTACGTGCACCTCTGCAGCAGGTGCAG |
| NM_153380 | ACCTTCACCTGGAAGTCACGCCTCAATATA |
| NM_012203 | AGGGGAGCCGATGCCTAGTGAACTCAAGCT |
| NM_001101 | TCGAGCAAGAGATGGCCACGGCTGCTTCCA |
| NM_001785 | GGTACGTATATTGTCATGACGGTCCAGGAG |
| NM_002341 | AACATCAGTCACCCCGATATGGTGGACTTC |
| NM_001152 | CAAGGGTGCATGGTCCAATGTTCTCAGAGG |
| NM_144488 | GAGGCATGTACCTCACTCGCAACGGGAACC |
| NM_021966 | CTACCCTGATGGACGATACCGATCCTCAGA |
| NM_002350 | GAGATCCAACGTCCAATAAACAGCAAAGGC |
| NM_001774 | GTCTACAACCGGCTCGCTCGATACCGTTAG |
| NM_013230 | CTCACTCTCTCTTCTGCATCTCTACTCTTA |
| NM_006325 | AGAGGTTGCTCAGACAACTGCTCTCCCGGA |
| NM_005340 | CTTGGAGGTCGGCAAATGCATTGGCCTCCT |
| NM_003039 | GGCAACCCTGATAGCTGCCTTTGGGTCATC |
| NM_002046 | GTGGACCTCATGGCCCACATGGCCTCCAAG |
| NM_000334 | AGACTGTGCGCCCAGGTGTCAAGGAGTCTC |
| NM_000484 | AAGTGGTATAAGGAAGTACATTCTGGCCAG |
| NM_170662 | CCTCCAGTATCCCCACGTCTAAATCTATAG |
| NM_006904 | GAGAAGGCGGCTTACCTGAGTGATCCCAGG |
| NM_133480 | CACTTAGTGCCCACAACCGCACCAAGAAGC |
| NM_000633 | ACCCTGGGTGCCTATCTGGGCCACAAGTGA |
| NM_002086 | CCGAGAGAGTGAGAGCGCTCCTGGGGACTT |
| NM_005248 | GACTACTTCACCTCCGCTGAACCACAGTAC |
| NM_002447 | TCTCACCCATGCCAGGGAATGTACGCCGGC |
| NM_003656 | TGTTGCTGTCGAGACTGCTGCGTGGAGCCG |
| NM_138980 | GACCCTGGCATCTGACACTGACAGCAGCCT |
| NM_016072 | CCTTGGATCCCTCCTAAATTTACCTGGAAT |
| NM_000785 | CTGGTACCTGAAAGGAGCATCAACCTACAG |
| AF200348 | TATGAGAACCCTGGGGTGTTCTCCCCGGCC |
| BC060842 | GGCTACCCATACAGCTTTCTGATGAGTTAA |
| NM_006302 | GACCAGCCTTGTCTTACTGGCCATGGCTGA |
| NM_020199 | CCTAGATCAGAATGTTAATGAGGCAATGCC |
| NM_024006 | GTTTCCGGAAGGTCCAAGAACCCCAGGGCA |
| NM_002229 | CTGCTTGGGGTCAAGGGACACGCCTTCTGA |
| NM_024099 | CTAGTGAACCACAGCTCAAAAGGCAAAAGA |
| NM_006378 | TGTGAGCTGAAGTTCGCTGACTCAGACGCA |
| NM_033334 | GCACTATTTCTGTTTCAGATGATCGGGCTG |
| NM_002814 | GGCCAAAGGTGGCCTGGGTTTAATACTCAA |
| NM_017771 | GATGCTCATGTAAGCAGCTTTTCGAGAGAA |
| NM_003002 | CAACTATCACGATGTGGGCATCTGCAAAGC |
| NM_003627 | GTGCTTAGCGGCTCTGAGGTGACCGCATAG |
| NM_005638 | AGAAACATAGATCTGGTAGCTCAGCGAGGA |
| NM_003288 | CAGGAAACTCTTTCACAGGCAGGACAGAAG |
| NM_003302 | TCTCAGTTCCAGTTCCCATCCTTTGATTGA |
| NM_016308 | GGAAAAGAGAATTCAGACCTACCTTCAGTC |
| NM_006113 | GAGGCATTTGACTTGTTTGATGTTCGTGAC |
| NM_006802 | GAGGATCTGAAAAGACAAGGACTGCTCTAG |
| NM_004184 | GATGAGATAGTGAAAGAGTTCATGACTCCC |
| NM_000089 | CAAGGTCCAGTTGGCCGAACTGGAGAAGTA |
| NM_004951 | TTTCTAGTGCTGTGAAGTCAGCCCCTGAAG |
| NM_002600 | AGCATTCGGCAGCGTCGTCGCTTCACTGTG |
| NM_005178 | TCAGCTCCAATGGTCTTCTCTCCGCATCAC |
| NM_001753 | GCAATGTCCGCATCAACTTGCAGAAAGAAA |
| NM_002414 | CCAGCTGTTCAGCGTACTCTTTTAGAGAAA |
| NM_001788 | GAAAAACGTCGTCAGTTCGAGGATGAGAAA |
| NM_016184 | GAGCTGGTTCATACAACATTGGAGTGTGTG |
| NM_005627 | TATGCGCCTCCCACGGACTCTTTCCTCTGA |
| NM_006329 | ACTGCGGATATATGTGTCGCAGTACCCATT |
| NM_016195 | CTCTTCCTGACCCCCAGGAAGCTACTGCTT |
| NM_006310 | CTTCAGCGGAAGGCCTCACCACCCACAGTG |
| NM_003707 | GCTGACCAGCAGGATAAGTACATGAAGTGA |
| NM_001845 | CGTCAGCCGCTGCCAAGTCTGTATGAGAAG |
| NM_006803 | GCTGGCCATTTCTGGACTCAAGGTGAATCG |
| NM_001219 | CACCTACGGCTACGTTTTAGATGATCCAGA |
| NM_001260 | CAGTACTCACATCAGACACATCGGTACTGA |
| NM_001916 | ATAAAGCGGCACAAGTGGTCAGTCCTGAAG |
| NM_000121 | GCTTATCCGATGGCCCCTACTCCAACCCTT |
| NM_002394 | TTTCTGGTAGTGCTTAACTTTGGGGATGTG |
| NM_004483 | GATCAAGATGACACTGAGTAACCCTTCAGA |
| NM_000521 | GATGGTCGAACGTGGAATAGCTGCACAACC |
| XM_167711 | CTGACAAATGACAAGACCCCTGAGGCATGA |
| AL833311 | CCTGCTATCACACAGAACAACTTTCTAACC |
| NM_013995 | GTGCTGGTCTTTCAGGCTTGATTATCGTTA |
| NM_024321 | CAGAGAGCAGATTCCGCTCTCTCCTCTGCA |
| NM_005952 | TCCTGCTCGCCTGTTGGCTCCTGTGCCTGT |
| NM_005375 | CTACCAGTAAGACTGTCATCATGTGCTTGA |
| NM_000946 | CCGTGAATTGGATGCCATTTCCACTAATGA |
| NM_004176 | TGCTGCACGACTGTCAGCAGATGCTCATGC |
| NM_002958 | ACAGAGTTTCATGCAGCCCTGGGGGCCTAC |
| NM_005063 | CCAGGATTAAAAGAACCGGAGATGGAAACT |
| NM_145341 | CAGATACTGAATGTAAACCCTGCAGATCCT |
| NM_003132 | AAGTACTACAACTCCGACGTGCACCGCGCC |
| NM_005100 | CAGGAGGAGAACCGAAATATCGAACAGATT |
| NM_021822 | CCAGGACTACAGGGTTACCTGCTTCACCTC |
| NM_020993 | GCCTCTCAACAAAACTCCGAAGAGATGTAG |
| NM_015099 | GACCTGGATTGCACTTAAGTTTGCACTCTA |
| NM_005127 | CAGCAACAGCTAGATGTTACACCGAAAGAA |
| NM_004010 | CCAGCCTATTTCCTTAATGCTGTAAGGAGG |
| NM_002305 | ACCGTCAAGCTGCCAGATGGATACGAATTC |
| NM_000237 | GAAAGTGTCTCATTTGCAGAAAGGAAAGGC |
| NM_006187 | GCTGCATGGGACGGAATGGCATCCCCATCC |
| NM_005419 | GATGGACCCTTGATGCCTTCTGACTTCTAG |
| NM_002576 | CAGCTAAGGAGGCAACAAAGAACAATCACT |
| NM_002390 | ATTCGCCGAGGAAGGTCCGGAGGGGCCTAA |
| NM_016187 | GGTATCCACAAGTGAAAATCCACAACTCTG |
| NM_014207 | GACTATGATCTGCATGGGGCTCAGAGGCTG |
| NM_005214 | CCTCACAGCTGTTTCTTTGAGCAAAATGCT |
| NM_003564 | GGCTACGGGATGCCACGCCAGATCCTCTGA |
| NM_002002 | AGTCCATGGGACCTGATTCAAGACCAGACC |
| NM_004001 | ACGGCAGCGAAGCAGAGCTCCCTCGTTGGT |
| NM_058176 | GCCCTTCTAGGAAATGAGCTGGAGCCACTT |
| NM_001558 | CTCATCTCTAGCCTGCAGTCAAGTGAGTGA |
| NM_006850 | GGGAAGTGGACATTCTTCTGACCTGGATGC |
| XM_042066 | AAGCATCCAGTCTTTCGTACTACATGGTAG |
| NM_033004 | GTGGAACCTCAGGTGCAACAGAGACGCCAG |
| NM_002835 | CCAAGAGATCCACCTTCAGAATGGACATGA |
| NM_000593 | TGGAGAAAAAGGGGTGCTACTGGGCCATGG |
| NM_002927 | GGATTCCTACCCCAGATTTCTAAAGTCAGA |
| NM_005012 | GCCAATATTCATGGACACACCGAATCTATG |
| NM_000655 | CAGTGCTGTACTTGATGACAGACACTTCTA |
| NM_005449 | TCTGAATCTCCCTGGCTCCATGCCCCATCT |
| NM_133378 | GTCATGTATAACAAGTTTTCTGACCCTGCC |
| NM_032663 | CCCTCACACCAGTATTTATCCTTAACACTC |
| NM_030753 | GCCAGGAGTGTATTCGCATCTACGACGTGC |
| NM_017935 | CGACCCCAAGTTGAAAAGGAATTTGGTTTC |
| NM_003202 | ACAGGTGGCCTAGCAGGCACAGGACACCTG |
| NM_030764 | TGAATATCCCTGTGAGAATTCCAGTGTCTC |
| NM_023109 | CCATCTCAGTAGGGATCTAGCCACATCCCC |
| NM_002738 | ACCAGTCCTAACACCTCCTGACCAGGAAGT |
| NM_006472 | ACCACCGACTTATACTGAGGTGGATCCCTG |
| NM_000417 | GCCCCAGCTCATATGCACAGGTGAAATGGA |
| NM_001775 | GAGGATTCATCTTGCACATCTGAGATCTGA |
| NM_005574 | GCCTGGACCCTTCAGAGGAACCAGTGGATG |
| XM_034274 | CCAGTAGTACTTCAAGAGCTCTCATACTGT |
| NM_001706 | ACCAAGGTGCAATACCGCGTGTCAGCCACT |
| NM_000902 | AAACAGATGTGCACAGTCCAGGCAATTTCA |
| NM_001102 | ACGGCGCTGTACGGCGAGAGTGACCTCTAA |
| NM_001718 | GCGCCAACTAAGCTAAATGCCATCTCGGTT |
| NM_033554 | TCATAAAGTCTCTGCGTTCTGGCCATGACC |
| NM_002122 | CCTGTTCTCAGACAATTTAGATTTGACCCG |
| NM_019111 | CCTGTGGAACTGAGAGAGCCCAACGTCCTC |
| NM_002124 | CCACGTTTCTTGTGGCAGCTTAAGTTTGAA |
| NM_014745 | CTCACCAAGAAGTACAATCATCTCAACCTC |
| NM_006993 | ATCCTTCCTGCCAAAAAGCAGGGGGGCAGG |
| NM_014366 | TCTGAGGAGACTACAGCAGGTGAACAGTCT |
| NM_003255 | CAGGAGTTTCTCGACATCGAGGACCCATAA |
| NM_002658 | CACACTTCTTACCCTGGATCCGCAGTCACA |
| NM_002704 | GAACCCATTGCAACCAAGTCGAAGTGATAG |
| NM_000090 | TCGAGGATTCCCTGGTAATCCAGGTGCCCC |
| NM_002026 | AGGGAAATTCTTTGGAAGAAGTGGTCCATG |
| NM_001766 | AGGCAAACTTCCTATCAGGGCGTCCTGTGA |
| NM_006614 | TCTACAGCAACTTTTCCCCTTCGGGCATAA |
| NM_004445 | CCAAGTTTGGCCTCTGTACCTTCAGTGATG |
| NM_006058 | ACCAGAGCCAGCTGATCTCAGATTGCCAAG |
| NM_052938 | TCCAGGCTGAGGAAAGCAAACATTACAGAT |
| NM_004126 | AGCTTCGCAAAGAAGTGAAGTTGCAGAGAC |
| NM_007360 | GTGCACTCTATGCCTCGAGCTTTAAAGGCT |
| NM_004225 | ACCCACTGATCCAGCCCCCCTACGAGGTCT |
| NM_005940 | GGTCCTGACTTCTTTGGCTGTGCCGAGCCT |
| NM_003800 | CCTGGATGTTCTCTTATCTGGAATCCATCA |
| NM_030956 | GAGGTTCTACAATCTCTCTGATGAGAACAG |
| NM_003453 | CCTTGGAAAATATGCTTGTACGGGTTCTTC |
| NM_018136 | GGAAGAAATCACAAATCCCCTGCAAGCTAT |
| NM_000682 | ACTTCCGCCGTGCCTTCCGGAGGATCCTGT |
| NM_181802 | ATCCAGAGCCTTCTAGGAGAACCCAACATT |
| XM_058619 | CTCCACAAACTGGTTGTGCTCGGCACCTGA |
| NM_018248 | GCAAGCGTTCCACCATGAAAACAGTATTGA |
| NM_000194 | GACAAGTTTGTTGTAGGATATGCCCTTGAC |
| NM_004526 | GAGAAAGTGTCCAGCCGAGCCATCTTCACC |
| NM_002426 | CTTCCTACTCCAACGTATCACCAAAACACT |
| NM_002608 | TCTCTGCTGCTACCTGCGTCTGGTCAGCGC |
| AF108138 | TGTGCTGCACTTCTATGCCACCCTGCGGCG |
| NM_002692 | CTCTGCATAAACCCTGGCTCTTTTCCAAGA |
| NM_003349 | GTCACAAAGCAAACTGAGTGATGAAGGAAG |
| NM_001067 | GGGCAAAGAAACCTATAAAGTACCTGGAAG |
| NM_013282 | ACGTGAACAGACTCTGCCGGGTCTGCGCCT |
| NM_002356 | TCAAGAAGTCTTTCAAGCTGAGCGGCTTCT |
| NM_002592 | TACTTGGCTCCCAAGATCGAGGATGAAGAA |
| NM_003113 | GCTGCAGCTGACAAGCAGTTTTATGAAAAG |
| NM_005292 | GATCTGGTAGTCTACGGTCACTAAGCAATA |
| NM_005192 | GCAGAGTTGTCCAAACAGACACAGAAGAAC |
| NM_000022 | CCAGCAGCAGACCGTGGTAGCCATTGACCT |
| NM_005163 | CCACCTGACCAAGATGACAGCATGGAGTGT |
| NM_001295 | CCTCCACAGGGGAGCATGAACTCTCTGCTG |
| NM_006887 | ACAGCTACCTAAGCGGCTCCCTGAGCTCCG |
| NM_005191 | TTGAGAAGGGAAAGTGTACGCCCTGTATAA |
| NM_006889 | GCCCAGCGTGTTTTTAAAAGTTCGAAGACA |
| NM_001846 | ATCGAATGCAATGGAGGCCGCGGCACCTGC |
| NM_002090 | ATCGAAAAGATACTGAACAAGGGGAGCACC |
| NM_004460 | GGCCTGTCCACGAACCACTTATACACCCAC |
| NM_032682 | CTGGAAAACAGCCTAAAGAGCAACAGCAGG |
| NM_006120 | ACTCCTGGGCCGTCCCTGAAGCTCCTACTC |
| NM_002120 | CTGGTAATGAGGTCTCAAGAGCTGTTCTGC |
| NM_006010 | ACTGATGCCTAAATATGCCCCCAAGGCAGC |
| NM_001560 | GACTCTGTAGTGCTGATAGAAAACCTGAAG |
| NM_172174 | GGCATTCATGTCTTCATTTTGGGCTGTTTC |
| NM_000632 | CTTCAAGCGGCAATACAAGGACATGATGAG |
| NM_004972 | GGATCAAATAAGGGATAACATGGCTGGATG |
| NM_004995 | GCTCTACTGCCAGCGTTCCCTGCTGGACAA |
| NM_172390 | GACCTCTCCAGCACGAGCACCCACTCCTAG |
| NM_005384 | AGACTTATAGCCACACAACCAATCTCTGCT |
| NM_001675 | AAGGCAAGGGGGAAGAAAAGGGTCCCCTAG |
| NM_000960 | TCCAAAGCAGAAGCCAGCGTCGCCTGCTCC |
| NM_000963 | CCACAGTACTACTAAAAGAACGTTCGACTG |
| NM_003037 | TATGCTAGTGTGACACTTCCAGAGAGCTGA |
| NM_018664 | GCTGCTCAGAGAAGTCGGAAGAAGCAGACC |
| NM_003121 | CTCCGAAACTACGCCAAGACCGGCGAGATC |
| NM_007315 | GGCTCTGTAGAATTCGACAGTATGATGAAC |
| NM_006290 | CTACTGCAACGAATGCTTTCAGTTCAAGCA |
| NM_007115 | AATGGATCCTGTATCCAAATCCAGTCAAGG |
| NM_012452 | CAGACAGTGGCCTTGGCATTGTGTGTGTGC |
| NM_003820 | TCATTCACGGGGAGGAGCCCAAACCACTGA |
| NM_005104 | TCAGACACCAGTGATTCAGACTCAGGCTAA |
| NM_000043 | GCCAATTCCACTAATTGTTTGGGTGAAGAG |
| NM_003326 | GAATGGCGGAGAACTGATTCTTATCCATCA |
| NM_005658 | AATGTTCCTCAAGTGCATTGTGGAGACCAG |
| NM_006060 | AAGCATGGGCCTTCCGGGCACACTGTACCC |
| NM_005608 | GGAAGCCAGAGACAGTGACACGGAGGGCGA |
| NM_005348 | GTCGTGGAACAAAAGTTATCCTACACCTGA |
| NM_000033 | ACCCACCGGCCCTCCCTGTGGAAATACCAC |
| NM_004915 | TTCACTTCCCCGAGCTCCGGAGAGGGATGG |
| NM_005186 | AAGTGGTTGCAGCTGACCATGTTTGCATGA |
| NM_005166 | CGCGAACTGCAGCGGCACGGCTATGAGAAC |
| NM_015193 | GCAGCTCATCCAGAGGGGCATGGAGGTGCA |
| NM_001178 | GCAGCTCCACTGACTACCAAGAAAGCATGG |
| NM_004317 | CCATGAGGTGCGGGGGGCAGACAAGGTCAA |
| NM_001187 | GACGGCACAGCTCTGTGCTTCATCTTCTGA |
| NM_172171 | CGTGAGGCTCGGATATGTCGACTTCTGAAA |
| NM_016280 | ACCCACACCTCCTTGGCTCTATGCTCCTGA |
| NM_000743 | GAAACATCCGATCAAGAACCTGGGCTATGA |
| NM_001762 | TTCTCTTGGTTGATGAGATCATGCGAGCTG |
| NM_000085 | TTCATTCCCTCTTTGTGACGTCGCGGGGCA |
| NM_001910 | AAAACGCCATTGGGGCAGCCCCCGTGGATG |
| NM_000778 | CCTACCCACCTGTATCTCTTGTTGGGAGAA |
| U53532 | TTGTTTCGACGAGTTCAACCGGAATTCGTG |
| NM_001939 | TTCTGATGTGACTGCCAACACCCTGCTGGC |
| NM_004091 | TACGACCTTGGGGACCTGTTGATTAATTGA |
| NM_001441 | GAGTTGTGTCTGCGGTTCATGCGGGAGGTG |
| NM_000148 | TTAATGCAGACTTGTCTCCACTCTGGACAT |
| NM_001777 | AAGCTGTAGAGGAACCCCTTAATGCATTCA |
| NM_002049 | GTGCTGTCAGGGCCTGTTAGCCACCTCATG |
| NM_002068 | ACGCCTTTTCAGCCACTACACATGTGCCAC |
| NM_005275 | TGGCTGGCCGAAACCCTTATGCCCTGCTGG |
| NM_002076 | GCGGCAGTGTCAGGACTCGAAGATTTTCCA |
| NM_005288 | CCCCTCCATCTATACCTACGCCACCCTCCT |
| NM_002094 | TGCCTTGAGACCTTTAAAGACTTCCCTCAG |
| NM_005513 | TGGGACAACGCATGTTTGAGGACCTCTTTG |
| NM_004963 | GCACTCTGGAATACTTGCAGCTGAATACCA |
| NM_000182 | TAGTGGACCGGCTCAAGAAATATGAAGCTG |
| XM_033511 | CACTATGTCCCAAGATGGATTCCCAAATGA |
| NM_006825 | TGCCCTCGGCCAAACAAAGGGGCTCCAAGG |
| NM_000867 | CATTCTACTAGATACGCTTCTCCTCACTGA |
| NM_006764 | ACCAAGGCTCGAAGCCGTGTGCGGGACAAG |
| NM_000612 | CCCTGATTGCTCTACCCACCCAAGACCCCG |
| NM_006083 | AAGGGCGGAAAACCAGGCGCTTCAAGGAAA |
| NM_006084 | AGCAGGCCTTTGCCCGATACTTGCTGGAGC |
| XM_045712 | ATCGGCTCCCCAAGATTAAGGAAACCACAG |
| NM_000229 | ACCCTGTGGGTGTGCTCTATGAGGATGGTG |
| NM_000234 | TCAGAACCAACAAGGCGAGGACTCAGGCTC |
| NM_025247 | CTGGGAAAATGGAATGCAACCCACATTGTA |
| NM_004255 | GAACTGGGAATCTCCACTCCGGAGGAACTG |
| NM_133259 | CTGTCCCTTTCATTGAACCCCCTGAAAGCT |
| NM_000239 | CGTCAGTATGTTCAAGGTTGTGGAGTGTAA |
| NM_005909 | CAACATCATGGTTTTAGCAAGCAGCAGCAC |
| NM_002379 | GAAGCTGTGAGTAAGCGGCTGGCCATCCTG |
| NM_002396 | GCATCAAGCCCTCCTGTGATAACAGAATAG |
| NM_139202 | CCACTGCGGAACAGGAGTGACTCTGGCTGC |
| NM_005936 | GGTGTCATCCAGGTACGTTCCAGCCGGCCA |
| NM_002421 | GAAAGCTAATAGCTGGTTCAACTGCAGGAA |
| NM_002476 | TTCTTGCCCATCCTGCAGCACATTTCCCGC |
| NM_002523 | TCGATGTGTTCGGAGGGGCCTCCAAGTGGC |
| NM_001862 | TTGGCTGCACAAAGGCGAGGCCCAGCGATG |
| NM_006981 | CCTGCTTTCAAATGAATGATCAGGGTCTCT |
| NM_002527 | GCCTTGTCGAGAAAAATCGGAAGAACATGA |
| NM_002557 | GTAACCCCTCAAACAAGTCCTCTTTCTCTA |
| NM_014735 | GCCATGGTAAAAGCAAGACACATCCCCTTT |
| NM_032940 | TCTGCGTCCTGAAACCATTGTCCTGTCAGC |
| NM_002739 | CCAGGGCTTCACCTACGTGAACCCCGACTT |
| NM_134260 | GGAGGCAGAATGGCAAGCCACCATATTCAC |
| NM_003973 | AGCTCTCCTGAAAGCTTCTCCCAAAAAAGC |
| NM_006642 | TGAGACTGGCTGATGTTCAGAGCACTTACT |
| NM_002640 | TGGAGCCAAGATTCTGTGCAGACCACCCTT |
| NM_004374 | GGCATACGCAGATTTCTACAGAAACTACGA |
| NM_005850 | CCTATGCCTCCGCATGGTATGCGTGGACCT |
| NM_000578 | TCTGGACCTGTTGCCTTGCCCACGGAGCCA |
| NM_014251 | TATCTACCTCAAAGGCTATTGGTGGAGGCC |
| NM_006841 | CTATGCTTGGCTTCTTGCTGATGACCATGA |
| NM_033262 | GCCCCCGCATGGTGGATATGAGTTTTCAGA |
| NM_014720 | GAGGAGCTTGCACAAAGCCAGCATGCTCAG |
| NM_006938 | CAGTTTACCTCTGGATACACTACTTGTGGA |
| NM_003107 | TAACTTCGAGCCCGGCTCCGGCTCGCACTT |
| NM_012448 | AGTCAGTGGATCCCGCACGCACAATCGTGA |
| NM_006453 | TGGGAAACCCATAAAGGCGCACTGCCCTAG |
| NM_003315 | CTTTGAAGCATCTGGTCCAGGGAATTTCTT |
| NM_170695 | GTTGCACTCAAACGGGCTGCAGAGATGGAG |
| NM_005077 | ATGATAAGTACATAGTCACTGGCTCGGGGG |
| NM_133502 | GGAGGCAGAAGATTTCTGGCCAGTGGAGAG |
| NM_003430 | CTTTTAGCCATTCTTCAGCCCTTGCTAAAC |
| NM_005157 | CATGGGGGTCCACACTGCAATGTTTTTGTG |
| NM_004418 | TACCTCATGCAGAGATCGCCGTGTGCGGCTG |
| NM_001719 | AACCCGGAAACGGTGCCCAAGCCCTGCTGT |
| NM_006835 | TCCCCTTGTCCACCTTTGCAGCCTGTTTCT |
| NM_000610 | TACAAATACGGGTTCATCACTGATTCCACC |
| NM_012287 | CCCAAATGGCATCCAATAATCCAGAGAAAC |
| NM_003879 | GCCCATTGTCCTGATCTGAAAATTCTTGGA |
| NM_005197 | TGCTTTTGAATACTCCCCCTGAGATACAAG |
| NM_001882 | ATCGGGGAATTCTGTTTGTCTGGTCTTTGA |
| NM_001319 | GTGGAGGTGGCCGATGAAACCAAATGCTGC |
| NM_001921 | AACAGCAGACCGAGTCAAAAGCTTCAGTGA |
| NM_006824 | AGCAGATGAGGAAGGGGCCCAGTGCTAAAC |
| NM_003648 | ACGTCGGGTCAGATCCGACAGAAGACCATC |
| NM_004441 | GAGCCTGTATGTCTCTTCTTTCTGTCCGTG |
| NM_002025 | TGAGCAGAGCACCTTTTCCATCCCAGGACA |
| NM_001530 | ACTGCAGGGTGAAGAATTACTCAGAGCTTT |
| NM_005531 | GGGGAGTTGAGATCTGTAATTCATAGTCAC |
| NM_000874 | ACAGTCGTCCTGCCTAAGCTTCCCCAGTAG |
| NM_014002 | CGAACGGCTAAATAGAGTCCCAGCACCTCC |
| NM_000628 | ACTCTGAGAGCGGCAAGCAGAATCCTGGTG |
| NM_000880 | TGAACTGCACTGGCCAGGTTAAAGGAAGAA |
| NM_001567 | ACCCGGCTCACAAGCGCCTCCTTCTGGACA |
| NM_001398 | GACCTCGTGAAGTCGGTCCAGCCCACGACT |
| NM_005544 | CCACCCGCCGCTCAAGTGAGGATTTAAGCG |
| NM_002249 | CTCTTGGGGTTTGTACTCAAAGGACTCCAT |
| NM_002755 | CAGTGGAGTGTTCAGTCTGGAATTTCAAGA |
| NM_003954 | ACTCGGGCATCGACCTGCAGTGCACACTGG |
| NM_002748 | CCTCAAATTCCTCATCAAACATACAGCAGC |
| NM_002408 | GGGAGATATTAGGGACCATGAACTCTGTAA |
| NM_004927 | AGGAGCTTAAAGCCTGGCTCTTGGAGAAAG |
| NM_004998 | GACTACGAGGCAAGCCAGGGCTGTTCCCCA |
| NM_003908 | CGAGCACAGCTCCGTGCCAAAGCTAACTAA |
| NM_005009 | AGAGCAGTGAGCTGGTGAGCTGGGCAGACG |
| NM_002542 | GACTTCTTCCTCTAGACTTGGAGGGCCTCC |
| NM_012383 | ACTGCCTTATACTGGGCTTGCCACGGGGGC |
| NM_005746 | GATCTTCTCCATACTGTCTTCAAGAATGGC |
| NM_002649 | CATCTTGTTCTTGGCATCAAACAAGGAGAG |
| NM_021127 | GTCGAGTGTGCTACTCAACTCAGGAGATTT |
| NM_006237 | AAGCGGATGAAATTCTCTGCCACTTACTGA |
| NM_003479 | TACGCTTCAGAGATACCAATGGGCATTGCT |
| NM_014369 | GAGATAGAGAATGGGCGGAAAAGGTGTGAG |
| NM_002828 | CTTTTGTTGGCTGGAGACTGTTTTTTCAGC |
| NM_001469 | CTGCCGGGCTTACGGGCTGAAGAGTGGTCT |
| NM_001754 | GAAGCTTTCTCTAGGTGTAGCAGAAACTGC |
| NM_006918 | CTCAGTTATGTGAAGGAGATGACAGAGGGA |
| NM_004630 | CTCTCCTCACCCAACTCCCTTTGCCTCTCC |
| NM_003105 | CCAGGCTGGGGTCCGCAATCTTCTCCTCTG |
| NM_004509 | GCCTACTGTCATCCACAAAGCTCCTTTTTT |
| NM_007237 | GGTCAGTTTCTTGTTTCTCTACAGAGACCT |
| NM_003120 | ACCTACCAGTTCAGCGGCGAAGTGCTGGGC |
| NM_182692 | GGAATTCTTCAATCGCAGAGGAGAACTGCG |
| NM_001066 | GAATGTGCCTTTCGGTCACAGCTGGAGACG |
| NM_003985 | TCATCGAGGGCAGCTCCTCTTTCCACAGCC |
| NM_006708 | CTGATGATGGTAAAATGAAAGGCCTGGCAT |
| NM_003387 | CGGAGTGAGTATTTCTGCCAAGGTTTTTGA |
| NM_003422 | ATGGTCCCCTTGTGTATGCAGGGTTCGCGC |
| NM_175870 | TCAACCGTCATCCTTTCCCTCGTCCTGGCT |
| NM_006748 | TTCTCATCACCACCTTACTTTGAGGACTAG |
| NM_001877 | TCTCCTCCTGTGACTCGCTGCCCTAATCCA |
| NM_000878 | CAGGGTCAGGACCCAACTCACTTGGTGTAG |
| NM_005923 | CTAAGGGGAGGGATGCTGTGCACACTGTGG |
| NM_000941 | AGGCGGTGGACTACATCAAGAAACTGATGA |
| NM_001242 | TGCAGAGCCTTGTCGTTACAGCTGCCCCAG |
| NM_006994 | CAACAACCAATCAGAACCATAAGCTACAGG |
| NM_001629 | ACCATCTCCCCTCTACTTCTCATTCCCTAA |
| NM_002107 | CAGCTAGCACGCCGCATACGTGGAGAACGT |
| NM_021603 | TGACTGGGTTGTCGATGGACGGTGGCGGCA |
| NM_003376 | TCTGGGCTGTTCTCGCTTCGGAGGAGCCGT |
| NM_000034 | TCAAATCCAAGGGCGGTGTTGTGGGCATCA |
| NM_004044 | TGGCTCCCGGCCAGCTCGCCTTATTTAGTG |
| NM_005998 | AGAAAGGCGATGACCAGAGCCGGCAAGGCG |
| NM_002156 | GGTGCAATGGGTGGAATGGGAGGTGGTATG |
| NM_002168 | CCGTATTATCTGGCAGTTCATCAAGGAGAA |
| NM_000884 | CTCCATTCGTATGAGAAGCGGCTTTTCTGA |
| NM_005566 | TGGGGGATCCAAAAGGAGCTGCAATTTTAA |
| NM_006636 | GTCTAAAGAGCTTGGGGTAGCCACTAATTA |
| NM_000269 | CTGGTAGATTACACGAGCTGTGCTCAGAAC |
| NM_002629 | GGATGAAGAGACGGTGCGCAAAGCCATGGA |
| NM_000365 | CTCAAGCCCGAATTCGTGGACATCATCAAT |
| NM_001148 | GAGGACATCTTTGACACAAGGCCCATTTGG |
| NM_138271 | GAAAATCTCAAAAAACGCGGAGAAGATGGG |
| NM_004049 | ACACAGGAGAATGGATAAGGCAAAACGGAG |
| NM_006624 | CACAAGCAACTGATTTCTCAGACCAAGAAG |
| NM_004166 | TCCGGGAGTTCAGGATTGCATGAAAAAGCT |
| NM_002989 | AGGACTGAGCGGTCACAGACCCCTAAAGGG |
| NM_003542 | TAAAACGTCAGGGGCGCACTCTGTATGGCT |
| NM_012073 | GATTGATGACATTCGTAAGCCTGGAGAATC |
| NM_000732 | CCCCTCCGAGATCGAGATGATGCTCAGTAC |
| NM_000733 | TATTCTGGCCTGAATCAGAGACGCATCTGA |
| NM_001781 | ACAACTGGTTCAACGTTACAGGGTCTGACA |
| NM_001809 | CCAGGCCCTATTGGCCCTACAAGAGGCAGC |
| NM_001280 | AGACAGTTACGACAGTTACGCTACACACAA |
| NM_007096 | CCATCCTTGCTACAGCCTAGAACAGGCAGC |
| NM_001891 | CCACCCACCAGATCTACCCTGTGACTCAGC |
| NM_001321 | GGAGCAGGGGCTCTTGTTCATGCCCAGTAA |
| NM_001908 | GAATTCCACGCACCGATCAGTACTGGGAAA |
| NM_005517 | AACCACAGAGAAGATCCGCGAGGTTGTCTG |
| NM_001909 | TCTTCATCGGCCGCTACTACACTGTGTTTG |
| NM_014750 | GGAGACATCAAGAACATGCCAGACACATTT |
| NM_004944 | CCTTCACCAACAGCAAAAAATCTGTCACTC |
| NM_004089 | AGAGCCAGCTCCCGAATCCCCACAAGTGCC |
| NM_004111 | GGCAGCAGGGAAGTTTAAAAGGGGAAAATA |
| NM_002036 | TCTGGGTATGTCCTCCAGGCGGAGCTCTCC |
| NM_006851 | CCACGTAACAGATACACTTCTCTCTTTCTC |
| NM_000405 | AAGATCGCTGCCTCTCTAAAGGGCATATAG |
| NM_002110 | GGAGCGGCCGACCTTCGAATACATCCAGAG |
| NM_005524 | TCCTCATTCCCAACGGGGCCTTCGCGCACA |
| NM_002136 | CGGCTTTGGCGGTGGTAGTGGAAGCAATTT |
| NM_145904 | GAGGGGTGAGTCCCCTACTCCCTCTTCACT |
| NM_005527 | CTGCGGAACAGGGTATGTGCCTGGAAGGCC |
| NM_007355 | GATGCGTCTCGCATGGAAGAAGTCGATTAG |
| NM_004258 | GTGACCACAAATAGGAGGGAAGACGAGGAG |
| NM_002194 | CTGGTCCAAAACCTGGCACCTGCAGAGACG |
| NM_000885 | TCTCATATGTTATGTGGAAGGCTGGCTTCT |
| NM_002306 | GACCTCACCAGTGCTTCATATACCATGATA |
| NM_002348 | CTATACTCTGTGCTCTCCCAAGGATATGAG |
| NM_005916 | CTAGGAGACAAGGGGCAGACAGCTAGGACT |
| NM_005520 | TGTCAAACCAGTCCAGCTACGGGGGCCCAG |
| NM_002397 | TGTCTGAGGATGTCGACCTGCTTTTGAATC |
| NM_014791 | GGAAGACATCCTATCTAGCTGCAAGGTATA |
| NM_000918 | GCAGGGGATGATGACGATCTCGAGGACCTG |
| NM_002627 | TCAGGCCAGCTGGAACATGTGCAGCCCTGG |
| NM_006219 | AGGGAAAGCTGGACTACTAAAGTGAACTGG |
| NM_002654 | AACACCATGCGTGTTGTTCCTGTGCCGTGA |
| NM_000302 | TACATCGCAGTCTCCTTCGTCGATCCCTAA |
| NM_002674 | AGAGTCTACCGACCCTGTTGGCAAGTCTGA |
| NM_002702 | GCAATCGGCGCCAGACGCTCAAGAACACCA |
| NM_002802 | GAAGGCACCCCTGAGGGGCTGTATCTCTAA |
| NM_005055 | ATGACCGAGATCGGAAACCGCCTGGGGCAG |
| NM_015004 | GCCTCCTTGCAGAGTGTTCTGCACAAGGAA |
| NM_002970 | ATTTTACCTATGACCCGTGGATTGGCAAGT |
| NM_005410 | AAGCCAGTGCCAGTTGACGCTGAAAGAATC |
| NM_005411 | ATGGAGTGAGTCAGTGACAGGAGCAGCGAC |
| NM_003034 | GAAGATACCTCACTCCAGCCCACTTCCTAG |
| NM_005628 | AACCCCCTCCTCAAACACTATCGGGGGCCC |
| NM_004955 | AGAGACCGCAGGAGCCATCATGGCCTTCTT |
| NM_031844 | AGGTAAGAAGAAGGCGGAAGGCGGCGGAGG |
| NM_003091 | GATTGTCTGGTTTCCTTACAGGGCCCCCTC |
| NM_004780 | GCAAAACGGGGCGGTCCTTATCCTATTTAA |
| NM_005650 | GCAGAACAAGACCGCGAAAGGCAGCCTCAG |
| NM_003249 | TGCATCCTGAGACCCGGCGGTTCCGAGGAT |
| NM_000074 | ATGGCACTGGCTTCACGTCCTTTGGCTTAC |
| NM_016292 | AGGGCCATGGTGGGCCGCTTGAATGAGCTG |
| NM_021643 | GGAAGAGAACTTGGACCCTTTCTTTAACTG |
| BX436497 | AACCCAGCTCTCTGTCTTGGAGGACCTGAA |
| NM_006088 | ACAATGTGAAAACGGCTGTCTGTGACATCC |
| NM_005347 | ATGAAGCTCTCCCTGGTGGCCGCGATGCTG |
| NM_003328 | CTGGCACCAATGTCCATATATGAAGTCATG |
| NM_007013 | CATGAAAATGGAGAGCCTTCAGCAAGGACA |
| NM_003441 | AGACGGTCCACAGATCGGAGTCAACATAAG |
| NM_021089 | GGGTGCTTCCATGTTATTTGACATCAGAGA |
| NM_004310 | AGGAGACGAAACAGAAGGAGGCTCTTCTCC |
| NM_016733 | GGCACGGCTCTTGCTTCCGGTGTTCAGAAT |
| NM_002818 | GAGAAAATTGTCACCCCAAAGGGTGAAGAA |
| NM_005018 | TTCCTAGCGGAATGGGCACCTCATCCCCCG |
| NM_002574 | GACAAACATGGGGAAGTGTGCCCAGCTGGC |
| NM_031966 | TAGTTCAAGATTTAGCCAAGGCTGTGGCAA |
| NM_006854 | GTAGTCCAGACCATCCTATACTGTGACTTC |
| NM_006332 | TCCAGACCCTCGGCACCTGCTACTTACCAA |
| NM_004619 | AGATGACACTCTGTTCTTGAAAGTGGCCGT |
| NM_016155 | GGTCTGCTCATGCACCTCTGGGGCATCCTC |
| NM_002659 | TGTGAGGAAGCCCAAGCTACTCATGTATAA |
| NM_000485 | TGGCACCTGTACCCTTCTTCTCTCTCCTGC |
| NM_006763 | AAGAACTACGTGATGGCAGTCTCCAGCTAG |
| NM_001743 | ATCGATGGAGATGGCCAGGTCAATTATGAA |
| NM_006191 | GAGAATCCCACCAGTGGGGAAACATTAGAA |
| NM_176783 | CAGGGGAGAAACAAAGGGAATGATCTATTG |
| NM_002961 | CTTTGAAGGCTTCCCAGATAAGCAGCCCAG |

[0183] The present invention further contemplates arrays that comprise an HCP combination as a subset of a larger collection of probes for applications other than profiling hematological cancers.

[0184] As indicated above, in addition to the polynucleotide probes of the HCP combination, the arrays can comprise one or more control probes. Controls that can be included on the arrays of this invention include hybridization controls, scanning controls, normalization controls, expression level controls and mismatch controls. The controls can be positive or negative controls, and may be selected to target bacterial sequences that are not found in humans. Examples of positive control target genes that can be included on arrays are found in Table 29 below. Examples of negative control target genes that can be included on arrays are found in Table 30 below.

TABLE 29
Exemplary positive control target genes

| Target Sequences | |
|---|---|
| (GenBank ™ | |
| Accession No.) | Description |
| NM_000518 | Human gene sequence (Homo sapiens hemoglobin, beta (HBB), mRNA) |
| NM_000518 | Human gene sequence (Homo sapiens hemoglobin, beta (HBB), mRNA) |
| NM_000518 | Human gene sequence (Homo sapiens hemoglobin, beta (HBB), mRNA) |
| NM_000518 | Human gene sequence (Homo sapiens hemoglobin, beta (HBB), mRNA) |
| NM_000518 | Human gene sequence (Homo sapiens hemoglobin, beta (HBB), mRNA) |
| CP000001 | Bacterial sequence (Bacillus cereus E33L, complete genome) |
| CP000001 | Bacterial sequence (Bacillus cereus E33L, complete genome) |
| CP000001 | Bacterial sequence (Bacillus cereus E33L, complete genome) |
| CP000001 | Bacterial sequence (Bacillus cereus E33L, complete genome) |
| CP000001 | Bacterial sequence (Bacillus cereus E33L, complete genome) |
| NC_007384 | Bacterial sequence (lla sonnei Ss046, complete genome) |
| NC_007384 | Bacterial sequence (lla sonnei Ss046, complete genome) |
| NC_007384 | Bacterial sequence (lla sonnei Ss046, complete genome) |
| NC_007384 | Bacterial sequence (lla sonnei Ss046, complete genome) |
| NC_007384 | Bacterial sequence (lla sonnei Ss046, complete genome) |
| AK152894 | Mouse sequence (Mus musculus activated spleen cDNA, RIKEN full-length |
| | enriched library, clone: F830213J22 product: polynucleotide kinase 3′- |
| | phosphatase, full insert sequence) |
| AK152894 | Mouse sequence (Mus musculus activated spleen cDNA, RIKEN full-length |
| | enriched library, clone: F830213J22 product: polynucleotide kinase 3′- |
| | phosphatase, full insert sequence) |
| AK152894 | Mouse sequence (Mus musculus activated spleen cDNA, RIKEN full-length |
| | enriched library, clone: F830213J22 product: polynucleotide kinase 3′- |
| | phosphatase, full insert sequence) |
| AK152894 | Mouse sequence (Mus musculus activated spleen cDNA, RIKEN full-length |
| | enriched library, clone: F830213J22 product: polynucleotide kinase 3′- |
| | phosphatase, full insert sequence) |
| AK152894 | Mouse sequence (Mus musculus activated spleen cDNA, RIKEN full-length |
| | enriched library, clone: F830213J22 product: polynucleotide kinase 3′- |
| | phosphatase, full insert sequence) |
| AK172558 | Mouse sequence (Mus musculus activated spleen cDNA, RIKEN full-length |
| | enriched library, clone: F830213J22 product: polynucleotide kinase 3′- |
| | phosphatase, full insert sequence) |
| AK172558 | Mouse sequence (Mus musculus activated spleen cDNA, RIKEN full-length |
| | enriched library, clone: F830213J22 product: polynucleotide kinase 3′- |
| | phosphatase, full insert sequence) |
| AK172558 | Mouse sequence (Mus musculus activated spleen cDNA, RIKEN full-length |
| | enriched library, clone: F830213J22 product: polynucleotide kinase 3′- |
| | phosphatase, full insert sequence) |
| AK172558 | Mouse sequence (Mus musculus activated spleen cDNA, RIKEN full-length |
| | enriched library, clone: F830213J22 product: polynucleotide kinase 3′- |
| | phosphatase, full insert sequence) |
| AK172558 | Mouse sequence (Mus musculus activated spleen cDNA, RIKEN full-length |
| | enriched library, clone: F830213J22 product: polynucleotide kinase 3′- |
| | phosphatase, full insert sequence) |
| NC_007292 | Bacterial sequence (Candidatus Blochmannia pennsylvanicus str. BPEN, |
| | complete genome) |
| NC_007292 | Bacterial sequence (Candidatus Blochmannia pennsylvanicus str. BPEN, |
| | complete genome) |
| NC_007292 | Bacterial sequence (Candidatus Blochmannia pennsylvanicus str. BPEN, |
| | complete genome) |
| NC_007292 | Bacterial sequence (Candidatus Blochmannia pennsylvanicus str. BPEN, |
| | complete genome) |
| NC_007292 | Bacterial sequence (Candidatus Blochmannia pennsylvanicus str. BPEN, |
| | complete genome) |

TABLE 30
Exemplary negative control target genes

| Target | |
|---|---|
| Sequences | |
| (GenBank ™ | |
| Accession No.) | DeSCRI10ption |
| NC_007292 | Bacterial sequence (Candidatus Blochmannia pennsylvanicus str. BPEN, complete |
| | genome) |
| NC_007292 | Bacterial sequence (Candidatus Blochmannia pennsylvanicus str. BPEN, complete |
| | genome) |
| NC_007292 | Bacterial sequence (Candidatus Blochmannia pennsylvanicus str. BPEN, complete |
| | genome) |
| NC_007292 | Bacterial sequence (Candidatus Blochmannia pennsylvanicus str. BPEN, complete |
| | genome) |
| NC_007292 | Bacterial sequence (Candidatus Blochmannia pennsylvanicus str. BPEN, complete |
| | genome) |
| NC_007384 | Bacterial sequence (Shigella sonnei Ss046, complete genome) |
| NC_007384 | Bacterial sequence (Shigella sonnei Ss046, complete genome) |
| NC_007384 | Bacterial sequence (Shigella sonnei Ss046, complete genome) |
| NC_007384 | Bacterial sequence (Shigella sonnei Ss046, complete genome) |
| NC_007384 | Bacterial sequence (Shigella sonnei Ss046, complete genome) |
| NC_007384 | Bacterial sequence (Shigella sonnei Ss046, complete genome) |
| NC_007384 | Bacterial sequence (Shigella sonnei Ss046, complete genome) |
| NC_007384 | Bacterial sequence (Shigella sonnei Ss046, complete genome) |
| NC_007384 | Bacterial sequence (Shigella sonnei Ss046, complete genome) |
| NC_007384 | Bacterial sequence (Shigella sonnei Ss046, complete genome) |
| NC_007384 | Bacterial sequence (Shigella sonnei Ss046, complete genome) |
| NC_007384 | Bacterial sequence (Shigella sonnei Ss046, complete genome) |
| NC_004547 | Bacterial sequence (Erwinia carotovora subsp. atroseptica SCRI1043, complete |
| | genome) |
| NC_004547 | Bacterial sequence (Erwinia carotovora subsp. atroseptica SCRI1043, complete |
| | genome) |
| NC_004547 | Bacterial sequence (Erwinia carotovora subsp. atroseptica SCRI1043, complete |
| | genome) |
| NC_004547 | Bacterial sequence (Erwinia carotovora subsp. atroseptica SCRI1043, complete |
| | genome) |
| NC_004547 | Bacterial sequence (Erwinia carotovora subsp. atroseptica SCRI1043, complete |
| | genome) |
| NC_004547 | Bacterial sequence (Erwinia carotovora subsp. atroseptica SCRI1043, complete |
| | genome) |
| NC_004547 | Bacterial sequence (Erwinia carotovora subsp. atroseptica SCRI1043, complete |
| | genome) |
| NC_004547 | Bacterial sequence (Erwinia carotovora subsp. atroseptica SCRI1043, complete |
| | genome) |
| NC_004547 | Bacterial sequence (Erwinia carotovora subsp. atroseptica SCRI1043, complete |
| | genome) |
| NC_004547 | Bacterial sequence (Erwinia carotovora subsp. atroseptica SCRI1043, complete |
| | genome) |
| NC_004547 | Bacterial sequence (Erwinia carotovora subsp. atroseptica SCRI1043, complete |
| | genome) |
| NC_004547 | Bacterial sequence (Erwinia carotovora subsp. atroseptica SCRI1043, complete |
| | genome) |
| | Bacterial sequence (E. coli rafA, rafB, and rafD genes encoding alpha-D- |
| M27273 | galactosidase, raf-permease, and raf-invertase, complete cds) |
| | Bacterial sequence (E. coli rafA, rafB, and rafD genes encoding alpha-D- |
| M27273 | galactosidase, raf-permease, and raf-invertase, complete cds) |
| M27273 | Bacterial sequence (E. coli rafA, rafB, and rafD genes encoding alpha-D- |
| | galactosidase, raf-permease, and raf-invertase, complete cds) |

[0185] An example of a hybridization control would be to include several spots of the same polynucleotide probe on one chip, each spot containing a different amount of probe. This allows for the amount of probe of a given sequence to be optimized. Another example of a hybridization control is dimethyl sulfoxide (DMSO), which is used as a negative control (i.e. should give no signal), and can also be used as a scanning control. Plant or bacterial sequences having sufficiently low homology with human sequences can also be utilized as negative hybridization and scanning controls. If a signal is detected at a plant spot, this could indicate a problem with hybridization, i.e. too low a hybridization stringency was used, or with scanning, for example, the chip was inserted into the scanner at the incorrect orientation. Poly A can be used as a positive hybridization specificity/non specificity control. A poly A spot should always give intense hybridization, thus if no signal is detected at a poly A spot this could indicate use of too high a hybridization stringency.

[0186] Dyes, for example fluorescent dyes such as Cy3 or Cy5, can be incorporated into a nucleic acid sequence, such as a PCR product, and can be used as a positive scanning control for chip arrays that utilise these fluorescent dyes. Other detectable labels such as gold, for example colloidal gold or other particles, can also be used. A positive scanning control should always give a signal.

[0187] Normalization controls are nucleic acid probes that are complementary to labeled reference oligonucleotides or other nucleic acid sequences that are added to the test sample. The signals obtained from the normalization controls after hybridization provide a control for variations in hybridization conditions, label intensity, “reading” efficiency and other factors that may cause the signal of a perfect hybridization to vary between arrays. For example, signals (such as fluorescence intensity) read from all other probes in the array can be divided by the signal from the control probe(s) thereby normalizing the measurements.

[0188] Expression level controls are probes that hybridize specifically with constitutively expressed genes in the test sample. A variety of constitutively expressed genes known in the art can be used for expression level controls, for example, constitutively expressed “housekeeping genes” such as the β-actin gene, the transferrin receptor gene, the GAPDH gene, and the like. Mismatch controls may also be provided for the probes to the target genes, for expression level controls or for normalization controls. Mismatch controls are oligonucleotide probes or other nucleic acid probes identical to their corresponding test or control probes except for the presence of one or more mismatched base that are sufficient to prevent hybridization. Controls for arrays can be synthesized by standard techniques or purchased from a variety of commercial suppliers, for example, Stratagene (SpotReport™, La Jolla, Calif., USA). Other controls suitable for inclusion in arrays are known in the art.

[0189] The array may additionally comprise one or more probes each of which is targeted to a gene that is diagnostic of a hematological cancer on a general level, but which does not provide any information regarding the type/subtype, or other features of a hematological cancer. Examples of such these genes that relevant to lymphoma are listed in Table 31.

TABLE 31
Genes that show common expression patterns in all
subtypes of lymphoma

| Symbol | Modulation |
|---|---|
| 11-Sep | Over |
| ABCC4 | Under |
| ABCD1 | Under |
| ADRB2 | Under |
| AKR1C3 | Under |
| ANXA1 | Under |
| ARRB2 | Under |
| ASPM | Over |
| BIRC5 | Over |
| C15orf20 | Over |
| CAT | Under |
| CCL5 | Under |
| CCNA2 | Over |
| CCNB1 | Over |
| CCR1 | Under |
| CD33 | Under |
| CD36 | Under |
| CDC2 | Over |
| CDC20 | Over |
| CDCA1 | Over |
| CDH5 | Over |
| CDKN3 | Over |
| CENPF | Over |
| CES1 | Under |
| CHEK1 | Over |
| CHN2 | Under |
| CIAS1 | Under |
| CLECSF6 | Under |
| CNN3 | Over |
| COL1A2 | Over |
| CSF3R | Under |
| CSPG2 | Under |
| CTGF | Over |
| CTSB | Under |
| CX3CR1 | Under |
| DAF | Under |
| DF | Under |
| DGKA | Under |
| DHFR | Over |
| DNAJB6 | Under |
| DOC1 | Over |
| DOK2 | Under |
| DPYD | Under |
| ENPP2 | Over |
| EVI2B | Under |
| FBN2 | Under |
| FEN1 | Over |
| FGR | Under |
| FLI1 | Under |
| FLNA | Under |
| FLPRL1 | Under |
| FN1 | Over |
| FOS | Under |
| GBA2 | Under |
| GEM | Over |
| GNS | Under |
| HAL | Under |
| HCK | Under |
| HHEX | Under |
| HIST1H2AC | Under |
| HOXA4 | Over |
| HOXA5 | Over |
| ID2 | Under |
| IGFBP7 | Over |
| IL2RA | Over |
| KIAA0247 | Under |
| KIF2C | Over |
| KLF4 | Under |
| LILRB3 | Under |
| MBNL1 | Under |
| MCM2 | Over |
| MCM5 | Over |
| MGC5395 | Under |
| MLC1SA | Over |
| MMP9 | Over |
| MSN | Under |
| MYO1B | Over |
| NRIP1 | Under |
| P2RY5 | Under |
| PCAF | Under |
| PCDH9 | Under |
| PF4 | Under |
| PFC | Under |
| PLAU | Over |
| POLD2 | Under |
| PPBP | Under |
| PTGDR | Under |
| PTPN12 | Under |
| RAB13 | Over |
| RELB | Over |
| RGL1 | Over |
| RNASE1 | Over |
| RNASE2 | Under |
| RPS6KA1 | Under |
| S100A12 | Under |
| S100A4 | Under |
| S100A6 | Under |
| SAMHD1 | Under |
| SATB1 | Under |
| SELPLG | Under |
| SERPING1 | Over |
| SESN3 | Over |
| SFRS3 | Over |
| SLC11A1 | Under |
| SMTN | Over |
| SNX2 | Under |
| SPIB | Over |
| SYNPO | Over |
| TBC1D8 | Under |
| TCF4 | Over |
| TDO2 | Over |
| TIE1 | Over |
| TM4SF2 | Over |
| TRIP6 | Over |
| TXNIP | Under |
| VIPR1 | Under |
| WEE1 | Over |

### 2.1 Preparation of the HCP Array

[0190] The HCP arrays can be prepared using one or a combination of standard array synthesis methods known in the art, such as spotting technology or solid phase synthesis.

[0191] For example, the HCP array can be synthesized either in situ (see, for example, Hughes, T R, et al. Nature Biotechnology, 19:343-347 (2001)) or by conventional synthesis followed by immobilization onto the substrate, for example using robotic spotting. Other in situ synthesis or depositing technologies currently being used to manufacture oligonucleotide-based chips and could be used to prepare the HCP arrays of the present invention (see for example, Lockhart D J, et al., Nat. Biotechnol. 1996 December; 14(13):1675-80 and Yershov G, et al., Proc Natl Acad Sci USA. 1996 May 14; 93(10):4913-8). Many kits and packages for preparing arrays are commercially available, for example, the Pronto!™ Microarray Printing kit (Promega, Madison, Wis.). In addition, many companies provide custom array synthesis services.

[0192] Detailed discussion of methods for attaching nucleic acids to a solid substrate can be found in, for example, U.S. Pat. Nos. 5,837,832; 5,215,882; 5,707,807; 5,807,522; 5,958,342; 5,994,076; 6,004,755; 6,048,695; 6,060,240; 6,090,556 and 6,040,138.

### 2.2 Testing of HCP Arrays

[0193] HCP arrays can be tested for their ability to detect the expression pattern of genes in the one or more HCP sets that they represent using methods known in the art and one or more appropriate biological samples. Appropriate biological samples include those listed above in section 1.3.1. For example, blood or tissue samples from patients with a hematological cancer, or samples from cultures of cell lines as described in section 1.3.1, can be used to prepare labelled RNA samples. These labelled RNA samples can be hybridized to the HCP array to determine the expression pattern of the genes targeted by the HCP combination on the array according to methods known in the art.

### 3. Methods of Profiling Hematological Cancers

[0194] The system of the present invention further provides for methods of profiling hematological cancers using the HCP combinations or HCP arrays described above. These methods provide for the determination of the expression pattern of genes of one or more HCP sets in a test sample taken from a subject having, suspected of having, or suspected of being at risk of developing, a hematological cancer. In general such methods involve contacting a test sample with an HCP combination or HCP array under conditions that permit hybridization of the probe(s) in the combination or array to any target nucleic acid(s) present in the test sample and then detecting any probe:target duplexes formed as an indication of the presence of the target nucleic acid in the sample. Expression patterns thus determined can be compared to one or more reference expression patterns to provide information relating to the features of the hematological cancer(s) under investigation.

[0195] A test sample can be contacted with each probe in an HCP combination sequentially or simultaneously. Contacting a test sample with an HCP array, for example, allows for the simultaneous analysis of several features of one or more types of hematological cancers. In one embodiment of the present invention, the methods employ an HCP array. In another embodiment, the methods allow for the screening of several features of one or more types of hematological cancers in a single assay.

### 3.1 Test Samples

[0196] Test samples suitable for use in the methods of the present invention comprise nucleic acids that provide gene expression information (i.e. comprise mRNA, or nucleic acids derived from mRNA). The test sample can be, for example, a blood or biopsy sample taken from the subject to be profiled. A biopsy sample can comprise, for example, cells or tissue from a hematological cancer.

[0197] The test sample can be a biological sample that is used directly in a method of the invention, or it can be a biological sample that is submitted to one or more preparation steps, for example, the test sample may be submitted to an enrichment or culture step to increase the number of cells in the sample; to one or more extraction, purification, and/or amplification steps to isolate, purify and/or amplify nucleic acids in the sample, to one or more reverse transcription or transcription steps, or combinations of these procedures and thereby provide a test sample for use in the methods of the invention.

[0198] For example, if required, nucleic acids for use in the methods of the present invention can be isolated from the sample according to one or a combination of a number of methods well known to those of skill in the art (see, for example, Laboratory Techniques in Biochemistry and Molecular Biology: Hybridization With Nucleic Acid Probes, Part I. Theory and Nucleic Acid Preparation, P. Tijssen, ed. Elsevier, New York, N.Y. (1993)). For example, cDNA corresponding to the mRNA in the test sample can be prepared by reverse transcription of the mRNA, and the resulting cDNA can be utilised in the methods of the invention. Alternatively, RNA can be transcribed from the cDNA using in vitro transcription techniques to provide cRNA, or DNA can be amplified from the cDNA using standard amplification methodology, such as PCR. The resulting cRNA or amplified DNA can then be used in the hematological cancer profiling methods. In the above cases, the isolated nucleic acids provide a test sample suitable for used in the methods of the present invention.

[0199] The test sample can also include control nucleic acids. For example, to ensure that any amplification and/or labeling procedures do not change the true distribution of target nucleic acids in a sample. For this purpose, a sample can be spiked with a known amount of a control polynucleotide and a control probe that specifically hybridizes to the control polynucleotides. After hybridization and processing, the hybridization signals obtained from the hybridised control polynucleotide and probe should reflect accurately the amount of control target polynucleotide added to the sample. Other controls are known in the art and can be included in the test sample.

[0200] Prior to using the test sample in the profiling method, it may be desirable to fragment the nucleic acids in the test sample. Fragmentation can improve hybridization by minimizing secondary structure and cross-hybridization to other nucleic acids in the test sample or to non-complementary polynucleotide probes. Fragmentation can be performed by mechanical or chemical means known in the art.

[0201] The nucleic acids in the test sample can be labeled if necessary with one or more detectable labels to allow for detection of hybridized probe/target duplexes. A detectable label is a moiety that can be detected by spectroscopic, photochemical, biochemical, bioelectronic, immunochemical, electrical, optical, chemical means and the like. Examples include, but are not limited to, radioisotopes, chemiluminescent compounds, labeled binding proteins, heavy metal atoms, spectroscopic markers (such as fluorescent markers and dyes), magnetic labels, linked enzymes, mass spectrometry tags, spin labels, electron transfer donors and acceptors, colloidal particles, and the like. Exemplary dyes include quinoline dyes, triarylmethane dyes, phthaleins, azo dyes, cyanine dyes and the like. Non-limiting examples of fluorescent markers include fluorescein, phycoerytirin, rhodamine, lissamine, Cy3 and Cy5. Biotin and colloidal gold are also suitable for labeling the nucleic acids in the test sample. Methods of labeling nucleic acids are well known in the art.

### 3.2 Hybridization and Detection

[0202] The hybridization and detection steps of the methods of the present invention can be carried out using standard techniques known in the art. In general during the hybridization step, the test sample is contacted with an HCP combination under conditions that permit hybridization of the probes in the combination to their target sequences. Hybridization can be, for example, standard solution hybridization, utilizing an HCP combination of probes in solution, or array hybridization utilizing an HCP array.

[0203] Examples of solution hybridization techniques contemplated by the present invention include, but are not limited to, Northern analysis, clone hybridization, cDNA fragment fingerprinting, subtractive hybridization, differential display, differential screening and combinations of these techniques (see, for example, Lockhart and Winzeler (2000) Nature 405:827-836, and references cited therein). Such methods are well known in the art.

[0204] In solution hybridization techniques the probes can be labeled with a detectable label, for example, a radioisotope, fluorophore, chemiluminophore, enzyme, colloidal particle, and fluorescent microparticle, antigen, antibody, hapten, avidin/streptavidin, biotin, enzyme cofactor/substrate, and the like. Alternatively, the presence of a probe:target hybrid can be detected using an intercalating dye such as ethidium bromide, SybrGreen, SybrGold, and the like.

[0205] Other techniques include those based on the polymerase chain reaction (PCR) and other amplification technologies, such as in vitro transcription (IVT), NASBA and other isothermal amplification techniques. Such methods typically involve reverse transcriptase-PCR (RT-PCR), in which cDNA is prepared from the test sample mRNA by reverse transcription using a poly-dT oligonucleotide primer, and the cDNA is then subjected to PCR. The PCR product is then detected using probes of the HCP combination. As indicated above, the probes can be labeled or unlabeled probes can be used in combination with an interchelating dye. If desired, the PCR product can be evaluated in real-time using methods known in the art, for example using techniques involving fluorescence resonance energy transfer (FRET), in which case, the probes could be TaqMan® probes, molecular beacon probes, Scorpion probes, or the like. Technology platforms suitable for analysis of PCR products include the ABI 7700, 5700, or 7000 Sequence Detection Systems (Applied Biosystems, Foster City, Calif.), the MJ Research Opticon (MJ Research, Waltham, Mass.), the Roche Light Cycler (Roche Diagnostics, Indianapolis, Ind.), the Stratagene MX4000 (Stratagene, La Jolla, Calif.), and the Bio-Rad iCycler (Bio-Rad Laboratories, Hercules, Calif.). Molecular beacons and other sensitive probes can also be used to detect the presence of a nucleic acid sequence in a mRNA or cDNA sample that has not been submitted to an amplification step.

[0206] Alternatively, the hybridization and detection steps can involve standard array-based techniques in which an HCP array of the invention is employed. Such array-based techniques generally involve contacting a test sample with the array under hybridization conditions, whereby complexes are formed between the polynucleotide probes on the HCP array and any complementary target nucleic acid molecules in the test sample. The presence of probe:target complexes is then detected, either qualitatively or quantitatively. Specific hybridization technology which may be practiced to generate the expression patterns are well known in the art, and include the technology described in U.S. Pat. Nos. 5,324,633; 5,470,710; 5,492,806; 5,525,464; 5,800,992; as well as WO 95/21265; WO 96/31622; WO 97/10365; WO 97/27317; and EP 373 203.

### 3.3 Determination of the Expression Pattern

[0207] The level of gene expression of one or more target genes in the test sample being evaluated, or the “expression pattern,” can be evaluated by qualitative and/or quantitative measures. Qualitative techniques detect differences in expression and classify these differences in expression into distinct modes without providing significant information regarding quantitative aspects of expression. For example, a technique can be described as a qualitative technique if it detects the presence or absence of expression of a gene sequence, i.e. an on/off pattern of expression. Quantitative techniques rate expression on a scale, for example, a scale of 0-5, a scale of 1-10, a scale of +−+++, from grade 1 to grade 5, a grade from a to z, or the like. It will be understood that the numerical, and symbolic examples provided are arbitrary, and that various graduated scales (or symbolic representations of graduated scales) can be employed in the context of the present invention to describe quantitative differences in gene expression. Typically, such techniques yield information corresponding to a relative increase or decrease in expression with respect to an appropriate control.

[0208] Various techniques known in the art that yield either quantitative or qualitative expression data are suitable for evaluating gene expression in a test sample in the methods of the present invention. In some cases, for example, when multiple techniques are employed to determine expression patterns of target genes, the determined expression pattern may be the result of a combination of quantitative and qualitative data.

### 3.4 Data Analysis

[0209] Once the expression pattern for the test sample has been determined, it can be compared with one or more reference or control expression patterns using methods known in the art. The increase or decrease in the level of expression of the various genes being interrogated with the HCP combination provides information relating to one or more features of a hematological cancer in the subject from which the test sample was taken. A reference or control expression pattern in the context of the present invention is an expression pattern obtained from probing a sample taken from an individual known to exhibit a particular feature of the hematological cancer under investigation (a positive reference or control expression pattern) or a sample taken from an individual known to lack a specific feature of the hematological cancer (a negative reference/control pattern). Alternatively, the reference may be the expression pattern obtained from probing a test sample taken from the same individual at a different time point, for example at an earlier stage in the disease, or prior to a particular therapy or treatment, and can thus act as a reference for whether the disease has progressed in that individual and/or to investigate the effects of a certain treatment. It will be readily apparent that when multiple features of a specific hematological cancer are being investigated that an expression pattern determined using the methods of the invention may need to be compared to several references in order to obtain information relating to all features under investigation. The methods of the present invention are also suitable for providing reference or control expression patterns.

[0210] In certain embodiments, the expression pattern determined from the test nucleic acid sample is compared to a single reference/control pattern to determine a feature of a hematological cancer. In other embodiments, the expression pattern determined from the test nucleic acid sample is compared to two or more different reference/control patterns to determine features of a hematological cancer. For example, the expression pattern determined from the test sample may be compared to a positive and negative reference pattern to obtain confirmed information regarding a feature of a hematological cancer.

[0211] The comparison of the expression pattern determined from the test sample and the one or more reference/control patterns can be performed using a number of methodologies known in the art, for example, by comparing digital images of the expression patterns, by comparing databases of expression data, etc. Patents describing ways of comparing expression patterns include, but are not limited to, U.S. Pat. Nos. 6,308,170 and 6,228,575.

[0212] The comparison step results in information regarding how similar or dissimilar the obtained expression pattern is to the control/reference patterns, which similarity/dissimilarity information is employed to determine the feature of the hematological cancer. For example, similarity with a positive control indicates that the test sample has the feature(s) of the hematological cancer present in the control sample. Likewise, dissimilarity with a positive control indicates that the test sample lacks these feature(s) of the hematological cancer.

[0213] Depending on the type and nature of the reference/control pattern(s) to which the expression pattern determined from the test sample is compared, the above comparison step yields a variety of different types of information regarding the test sample that is assayed. As such, the above comparison step can yield information regarding multiple features of hematological cancers.

[0214] It is contemplated that one or more databases of reference/control expression patterns can be compiled and that the expression pattern of a test sample can be carried out using a computer program that compares the expression pattern of the test sample with those in the database. This type of analysis would allow information regarding the features of the hematological cancer under investigation to be obtained rapidly and would further provide for rapid throughput of multiple test samples.

### 3.5 HCP Signatures

[0215] As noted above, the methods and system of the present invention can be used to determine the expression pattern of genes from one or more HCP sets by probing a test sample with an HCP combination. Once a representative number of test samples have been probed, the expression pattern obtained from each test sample for the genes from the one or more HCP sets can be analysed in order to identify “HCP signature genes” that represent one or more features of a hematological cancer. HCP signature genes are identified on the basis of the extent that the level of expression of the gene changes when compared to the control. For example, statistical analysis can be employed in order to determine which genes show a statistically significant change in expression level over the control. Alternatively, a pre-determined differential expression limit can be imposed as a “cut-off” value. In one embodiment, HCP signature genes are defined as genes that show at least a 2-fold change in expression level relative to the control. In another embodiment, HCP signature genes are defined as genes that show at least a 3-fold change in expression level relative to the control. In a further embodiment, HCP signature genes show at least a 5-fold change in expression level. In a further embodiment, HCP signature genes show at least a 10-fold change in expression level. The change in expression level demonstrated by an HCP signature gene can be an increase in expression or a decrease in expression relative to the control.

[0216] The combination of the HCP signature thus identified represents a refined HCP set that can be used to define an expression pattern profile, or “HCP signature,” that is specific to the one or more features of a hematological cancer of interest. This HCP signature can be used as a reference expression pattern considered indicative of one or more feature of a hematological cancer, and thus be compared to the expression pattern obtained from a test sample in order to determine whether the test sample has one or more features of the hematological cancer. The number of genes represented in an HCP signature can vary between about 10 and about 500. In one embodiment, the number of genes represented in an HCP signature is between about 20 and about 300. In another embodiment, the number of genes represented in an HCP signature is between about 30 and about 200. In a further embodiment, the number of genes represented in the HCP signature is between 30 and about 160.

[0217] Representative examples of HCP signatures are depicted in Tables 32-41 below.

TABLE 32
DLBCL Signature (≧2-fold relative to control) [51 genes]

| Overexpressed | Underexpressed |
|---|---|
| Symbol | Symbol |
| ABTB2 | ABCB1 |
| BASP1 | BCL2 |
| BIK | BTBD3 |
| CCNE2 | CASP10 |
| CD22 | CDC25B |
| CDCA7 | CLECSF2 |
| CDK4 | CSTA |
| CKS1B | EBI2 |
| CYP27B1 | EPHB6 |
| DNMT3B | GNG11 |
| E2F5 | ICAM2 |
| FAP | IL10RA |
| GRHPR | LYN |
| IL1R1 | MLLT2 |
| LOC90925 | MRPL33 |
| MAD2L1 | PDCD4 |
| MCM4 | PRKCQ |
| MCM7 | RORA |
| MMP12 | SFRS7 |
| MS4A1 | SFRS9 |
| NME1 | TES |
| PARP1 | TGFBR2 |
| PLCG2 | TGFBR3 |
| POLE2 | |
| RGS13 | |
| TERF2 | |
| TOP2A | |
| TRAF1 | |

TABLE 33
FL Signature (≧2-fold relative to control) [70 genes]

| Overexpressed | Underexpressed |
|---|---|
| Symbol | Symbol |
| ABTB2 | ABHD3 |
| ARID5B | ADAM10 |
| BASP1 | ASB7 |
| BIK | BIN2 |
| CCL19 | BZRP |
| CD19 | CASP3 |
| CD22 | CYBB |
| CD24 | DAXX |
| CD81 | EMP3 |
| CDCA7 | HK2 |
| CLU | HSPA6 |
| CR2 | IFI30 |
| CTLA4 | IL15 |
| E2F5 | KLRK1 |
| FCER2 | LGALS1 |
| GCET2 | LYN |
| GPR18 | MRPL33 |
| GYPC | NKG7 |
| IGJ | NPC1 |
| IL1R1 | P4HA1 |
| IRF8 | PRKCD |
| KHDRBS3 | RBBP4 |
| KIAA0746 | SERPINA1 |
| LOC90925 | SFRS7 |
| LPL | SYBL1 |
| MAGED1 | TGFBR3 |
| MCM4 | TIGD7 |
| MS4A1 | TLE1 |
| OSBPL10 | TNFSF10 |
| PARP1 | TYROBP |
| PIK3C2B | WARS |
| POSTN | |
| RGS13 | |
| SPAP1 | |
| TIMD4 | |
| TNFRSF7 | |
| TRAF1 | |
| TRAF5 | |
| UBE2J1 | |

TABLE 34
HL Signature (≧2-fold relative to control) [33 genes]

| Overexpressed | Underexpressed |
|---|---|
| Symbol | Symbol |
| AKR1C1 | 13CDNA73 |
| APOC2 | CDKN2D |
| CCL19 | CSTA |
| CD81 | EBI2 |
| CTLA4 | GNG11 |
| CYP27B1 | HSPA6 |
| DHCR24 | KLRK1 |
| FLJ40504 | LYN |
| GSTT1 | MRPL33 |
| IL1R1 | PISD |
| KIAA0992 | SORL1 |
| LGMN | STS-1 |
| MMP12 | TGFBR3 |
| NFKBIA | |
| PIK3C2B | |
| PRAME | |
| SLAMF1 | |
| STAT1 | |
| TFF3 | |
| TRAF1 | |

TABLE 40
AML Cell Line Signature
(≧5-fold relative to control) [129 genes]

| Overexpressed | | Underexpressed | |
|---|---|---|---|
| | GenBank ™ | | GenBank ™ |
| Symbol | Accession No | Symbol | Accession No |
| BIRC5 | NM_001168.1 | AKAP12 | AI672553.1 |
| BZRP | NM_007311.2 | ANXA1 | NM_000700.1 |
| C13orf18 | NM_025113.1 | APOBEC3G | NM_021822.1 |
| C3orf6 | AK055652.1 | ASPM | NM_018136.2 |
| CDC20 | NM_001255.1 | AUTS2 | NM_015570.1 |
| CDC6 | NM_001254.2 | BASP1 | NM_006317.3 |
| CDCA7 | NM_031942.3 | BCL2A1 | NM_004049.2 |
| CDKN3 | NM_005192.2 | BIRC3 | NM_001165.3 |
| CHEK1 | NM_001274.2 | BTK | NM_000061.1 |
| CLIC5 | AL049313.1 | CASP4 | AL050391.1 |
| CSF1R | NM_005211.2 | CCL5 | NM_002985.2 |
| DMD | NM_000109.2 | CCNA2 | NM_001237.2 |
| FGR | NM_005248.1 | CD2 | NM_001767.2 |
| HCK | NM_002110.2 | CD24 | NM_013230.1 |
| IL16 | NM_004513.3 | CD36 | NM_001001547.1 |
| KNTC2 | NM_006101.1 | CD3D | NM_000732.2 |
| LGALS1 | NM_002305.2 | CD44 | NM_000610.3 |
| LGALS3 | NM_002306.1 | CD79B | NM_000626.1 |
| LILRB1 | AI523104.1 | CD86 | NM_006889.2 |
| NKG7 | NM_005601.3 | CDC2 | NM_001786.2 |
| PCDH9 | BC042366.1 | CDCA1 | NM_031423.2 |
| PLA2G7 | NM_005084.2 | CR2 | NM_001877.2 |
| PLCG2 | NM_002661.1 | CSF3R | NM_156038.2 |
| PON2 | NM_000305.1 | CSTA | NM_005213.2 |
| PPBP | NM_002704.2 | CTGF | NM_001901.1 |
| PRKCD | NM_006254.3 | CX3CR1 | NM_001337.2 |
| PTPN6 | NM_002831.3 | CXCR4 | NM_003467.1 |
| PTPRC | NM_002838.2 | DNTT | NM_004088.2 |
| RAB13 | NM_002870.2 | EBI2 | NM_004951.2 |
| RAG2 | NM_000536.1 | ENPP2 | NM_006209.2 |
| S100A6 | NM_014624.2 | ENTPD1 | NM_001776.3 |
| SERPINA1 | NM_000295.3 | FCER2 | NM_002002.3 |
| SFRS3 | BE927772.1 | FLJ40504 | NM_173624.1 |
| SPAP1 | NM_030764.2 | GUCY1A3 | NM_000856.1 |
| SPIB | NM_003121.1 | HCLS1 | NM_005335.3 |
| TCF4 | AI307786.1 | HIST1H2AC | BC050602.1 |
| TCF7 | NM_201632.1 | HIVEP2 | NM_006734.2 |
| TIMP1 | NM_003254.1 | HLA-DMA | NM_006120.2 |
| TLE1 | NM_005077.3 | HLA-DPA1 | NM_033554.2 |
| | | HLA-DPB1 | NM_002121.4 |
| | | HLA-DRA | NM_019111.2 |
| | | IFI30 | NM_006332.3 |
| | | IFI44L | NM_006820.1 |
| | | IGJ | NM_144646.2 |
| | | IL10RA | NM_001558.2 |
| | | KIF2C | NM_006845.2 |
| | | KLRK1 | NM_007360.1 |
| | | KRT19 | NM_002276.3 |
| | | LCK | NM_005356.2 |
| | | LTB | NM_002341.1 |
| | | LY86 | NM_004271.1 |
| | | MAD2L1 | NM_002358.2 |
| | | MAL | NM_022438.1 |
| | | MBNL1 | NM_021038.3 |
| | | MGMT | NM_002412.2 |
| | | MS4A1 | NM_021950.2 |
| | | MT1G | NM_005950.1 |
| | | MYL4 | W04885.1 |
| | | NAPSA | NM_004851.1 |
| | | NCF4 | NM_013416.2 |
| | | P2RY5 | NM_005767.3 |
| | | PF4 | NM_002619.1 |
| | | PLAU | NM_002658.1 |
| | | POLE2 | NM_002692.2 |
| | | PRAME | NM_006115.3 |
| | | PSPH | NM_004577.3 |
| | | PTPRCAP | NM_005608.1 |
| | | RGL1 | NM_015149.2 |
| | | RIPK2 | NM_003821.4 |
| | | RNASE1 | NM_198232.1 |
| | | S100A12 | NM_005621.1 |
| | | S100A4 | NM_002961.2 |
| | | SAMHD1 | NM_015474.2 |
| | | SERPINB1 | NM_030666.2 |
| | | SERPING1 | NM_000062.1 |
| | | SESN3 | BU929213.1 |
| | | SLA | NM_006748.1 |
| | | SLAMF1 | NM_003037.1 |
| | | SLC1A4 | NM_003038.2 |
| | | SORL1 | U90916.1 |
| | | STMN1 | NM_005563.3 |
| | | SWAP70 | AB014540.1 |
| | | TCL1A | NM_021966.1 |
| | | TFRC | NM_003234.1 |
| | | TOP2A | NM_001067.2 |
| | | TRIP6 | NM_003302.1 |
| | | TXNIP | NM_006472.1 |
| | | TYROBP | NM_003332.2 |
| | | VEGF | BC058855.1 |
| | | ZAP70 | NM_001079.3 |

TABLE 41
T-ALL Cell Line Signature
(≧5-fold relative to control) [111 genes]

| Overexpressed | | Underexpressed | |
|---|---|---|---|
| | GenBank ™ | | GenBank ™ |
| Symbol | Accession No | Symbol | Accession No |
| BIRC5 | NM_002102.2 | AKAP12 | W04885.1 |
| C13orf18 | NM_001168.1 | ANXA1 | NM_013230.1 |
| C3orf6 | NM_001255.1 | APP | NM_173624.1 |
| CD74 | NM_006101.1 | ASPM | BC058855.1 |
| CDC20 | NM_001254.2 | AUTS2 | NM_002358.2 |
| CDC6 | NM_001274.2 | BASP1 | NM_018136.2 |
| CHEK1 | NM_000536.1 | BCL2A1 | NM_006845.2 |
| CLIC5 | NM_004088.2 | BIRC3 | NM_031966.2 |
| CSF1R | NM_201632.1 | BTK | NM_001237.2 |
| DNTT | NM_005601.3 | CASP4 | NM_001067.2 |
| FGR | NM_002838.2 | CCL5 | NM_003234.1 |
| GYPE | AL049313.1 | CCNA2 | NM_001786.2 |
| IL16 | AI307786.1 | CCNB1 | NM_002692.2 |
| KNTC2 | NM_000305.1 | CD2 | NM_004577.3 |
| LILRB1 | AK055652.1 | CD24 | NM_022438.1 |
| NKG7 | NM_002870.2 | CD36 | NM_006748.1 |
| PCDH9 | NM_025113.1 | CD37 | NM_004615.2 |
| PLCG2 | NM_002661.1 | CD3D | NM_000700.1 |
| PON2 | NM_003121.1 | CD44 | NM_000732.2 |
| PTPRC | NM_004513.3 | CD86 | NM_003467.1 |
| RAB13 | AI523104.1 | CDC2 | NM_001767.2 |
| RAG2 | NM_004355.1 | CNN3 | NM_005356.2 |
| SERPINA1 | BC042366.1 | CSF3R | NM_006734.2 |
| SPIB | NM_005248.1 | CSTA | NM_001079.3 |
| TCF4 | NM_001242.3 | CTGF | NM_005608.1 |
| TCF7 | NM_005211.2 | CXCR4 | NM_005531.1 |
| TNFRSF7 | NM_000295.3 | EBI2 | NM_012151.2 |
| | | ENG | AI672553.1 |
| | | ENPP2 | BU929213.1 |
| | | ENTPD1 | NM_005965.3 |
| | | F8A1 | NM_000237.1 |
| | | FCER2 | NM_001839.2 |
| | | FLJ40504 | NM_006209.2 |
| | | FN1 | NM_000062.1 |
| | | HCK | NM_212474.1 |
| | | HCLS1 | NM_001901.1 |
| | | HIST1H2AC | NM_003302.1 |
| | | HIVEP2 | NM_003821.4 |
| | | HLA-DMA | BC050602.1 |
| | | HLA-DPA1 | NM_015149.2 |
| | | HLA-DPB1 | NM_021966.1 |
| | | HLA-DRA | NM_002002.3 |
| | | IFI16 | NM_006317.3 |
| | | IFI30 | NM_006120.2 |
| | | IFI44L | NM_001774.1 |
| | | IGJ | NM_144646.2 |
| | | IL10RA | NM_021950.2 |
| | | KIF2C | NM_002341.1 |
| | | KLRK1 | NM_013416.2 |
| | | LCK | NM_005213.2 |
| | | LPL | NM_015570.1 |
| | | LTB | U90916.1 |
| | | LY86 | NM_004049.2 |
| | | MAD2L1 | NM_015474.2 |
| | | MAL | NM_004951.2 |
| | | MBNL1 | NM_003037.1 |
| | | MS4A1 | NM_156038.2 |
| | | MYL4 | NM_001776.3 |
| | | MYLK | NM_004851.1 |
| | | NAPSA | NM_000484.2 |
| | | NCF4 | NM_006820.1 |
| | | POLE2 | NM_000061.1 |
| | | PSPH | NM_002985.2 |
| | | PTPRCAP | NM_001558.2 |
| | | RGL1 | NM_000610.3 |
| | | RIPK2 | NM_004271.1 |
| | | S100A12 | AB014540.1 |
| | | S100A4 | NM_001165.3 |
| | | SAMHD1 | NM_006889.2 |
| | | SERPING1 | NM_002110.2 |
| | | SESN3 | NM_005335.3 |
| | | SLA | NM_007360.1 |
| | | SLAMF1 | NM_000118.1 |
| | | SORL1 | AL050391.1 |
| | | SWAP70 | NM_001001547.1 |
| | | TCL1A | NM_005621.1 |
| | | TFRC | NM_021038.3 |
| | | TM4SF2 | NM_006332.3 |
| | | TOP2A | NM_002961.2 |
| | | TRIP6 | NM_006472.1 |
| | | TXNIP | NM_003332.2 |
| | | TYROBP | NM_033554.2 |
| | | VEGF | NM_002121.4 |
| | | ZAP70 | NM_019111.2 |

TABLE 35
MCL Signature (≧2-fold relative to control) [80 genes]

| Overexpressed | Underexpressed |
|---|---|
| Symbol | Symbol |
| 3.8-1 | 13CDNA73 |
| ADAM19 | ABHD3 |
| ARHGAP24 | AHR |
| BANK1 | BIN2 |
| BASP1 | CAMK1 |
| C13orf18 | CCND3 |
| C3orf6 | CD58 |
| CACNB2 | CD86 |
| CD19 | CSTA |
| CD22 | FAS |
| CD24 | GATA3 |
| CD79B | HBS1L |
| CELSR1 | IFI30 |
| CR2 | IL1B |
| DNMT3A | LGALS2 |
| E2F5 | MAPKAPK3 |
| GM2A | MLLT3 |
| GTF2E2 | MRPL33 |
| HLA-DOB | NKG7 |
| ITGAD | NUCB2 |
| KCNN4 | PISD |
| KIAA0355 | PRKCQ |
| KIAA0746 | S100A10 |
| LOC55565 | SERPINA1 |
| LOC90925 | SERPINB1 |
| LPL | SERPINB8 |
| MCM7 | SLAMF1 |
| MGC39372 | SORL1 |
| MME | STAT5B |
| KIAA0504 | TNFSF10 |
| MS4A1 | TYROBP |
| MYH11 | WARS |
| NAPSA | |
| NFATC1 | |
| NFKBIE | |
| OSBPL10 | |
| PARP1 | |
| PDLIM1 | |
| PIK3C2B | |
| PLCG2 | |
| RASA1 | |
| SPAP1 | |
| SYK | |
| TNFRSF13B | |
| TNFRSF7 | |
| TRAF5 | |
| UNG | |
| ZNF177 | |

TABLE 36
MZL Signature (≧2-fold relative to control) [159 genes]

| | |
|---|---|
| Overexpressed | Underexpressed |
| SYMBOLol | Symbol |

| | |
|---|---|
| ABTB2 | 13CDNA73 |
| AKR1C1 | ABCB1 |
| APOC2 | ABHD3 |
| APOD | ANXA5 |
| ARID5B | APC |
| BAIAP2L1 | APOBEC3G |
| BASP1 | ARF6 |
| BIK | ARID4A |
| BTG2 | ASB7 |
| C13orf18 | BCL2A1 |
| C3orf6 | BLVRB |
| CCL19 | C5orf15 |
| CD19 | CAMK1 |
| CD209L | CASP3 |
| CD22 | CCND3 |
| CD24 | CCNG2 |
| CD72 | CCR5 |
| CD79B | CCT6A |
| CDCA7 | CD86 |
| CDK4 | CLECSF2 |
| COL9A2 | CYBB |
| COL9A3 | DCK |
| CR2 | EIF4A2 |
| CRYM | ELF1 |
| CSNK1E | FKBP5 |
| CTSD | GLUD1 |
| DBN1 | GMPS |
| DHCR24 | GNG10 |
| DMD | GNG11 |
| DNMT3B | HIST1H2BK |
| DVL2 | HSPCA |
| E2F5 | HSPH1 |
| EPHB6 | IL15 |
| FCER2 | IL8 |
| FLJ40504 | IQWD1 |
| FSCN1 | ITGB1 |
| GM2A | KLRK1 |
| GSTT1 | LGALS3 |
| HIP1R | LOC54103 |
| HLA-DOB | LTBP1 |
| HLA-DQA1 | LYN |
| IGHM | MAFB |
| IGJ | MAPK9 |
| ITGAD | MGC5395 |
| ITIH3 | MLLT2 |
| KCNN4 | MYC |
| KHDRBS3 | NFE2L2 |
| KIAA0746 | NFE2L3 |
| KRT5 | NKG7 |
| LOC55565 | NPC1 |
| LOC90925 | NT5E |
| LPL | NUCB2 |
| MAGED1 | P4HA1 |
| MCM7 | PBX3 |
| MME | PIK3CA |
| MS4A1 | PPM1B |
| NFATC1 | PRDM2 |
| NME1 | PROS1 |
| OSBPL10 | PTPRC |
| PIK3C2B | RBBP4 |
| PLK3 | RBM12 |
| PRKCB1 | RORA |
| PTPN7 | S100A10 |
| RASA1 | SAFB |
| RASGRF1 | SELL |
| RGS13 | SERPINA1 |
| SH3BP5 | SERPINB1 |
| SLC38A3 | SFRS9 |
| SPAP1 | SORL1 |
| SYK | STAT3 |
| TCL1A | SYBL1 |
| TFF3 | TEGT |
| TNFRSF13B | TES |
| TNFRSF7 | TNFSF10 |
| TRAF5 | TOP2B |
| TYMS | TYROBP |
| WNT10A | UBE2D2 |
| WNT5B | WAC |
| YWHAE | WARS |
| | ZBTB16 |

TABLE 37
SLL Signature (≧2-fold relative to control) [128 genes]

| Overexpressed | Underexpressed |
|---|---|
| Symbol | Symbol |
| 3.8-1 | ABCB1 |
| AKAP12 | ABHD3 |
| AKR1C1 | ADAM10 |
| ARID5B | ANXA5 |
| BIK | BCL2A1 |
| C13orf18 | BID |
| C3orf6 | BIRC2 |
| CACNB2 | BTBD3 |
| CCL19 | CAMK1 |
| CCNE1 | CASP3 |
| CD19 | CCNG2 |
| CD209L | CCR5 |
| CD22 | CD86 |
| CD24 | CLU |
| CD72 | CSF1R |
| CD79B | CSTA |
| CDK4 | CYBB |
| COL9A2 | EBI2 |
| COL9A3 | EIF4A2 |
| CR2 | FKBP5 |
| CSNK1E | GATA3 |
| CTSD | HK2 |
| DMD | HLA-DRB1 |
| DNMT3B | HSPA5 |
| E2F5 | HSPH1 |
| FCER2 | IFI30 |
| FLJ40504 | IL15 |
| CS0DC015YK09 | IL1B |
| HIVEP2 | IL8 |
| HLA-DOB | IQWD1 |
| HLA-DQA1 | ITGB1 |
| IGFBP4 | LGALS1 |
| IRF8 | LGALS2 |
| KCNN4 | LGALS3 |
| KIAA0746 | LTBP1 |
| LOC55565 | MLLT2 |
| LPL | MLLT3 |
| MS4A1 | MYC |
| MYH11 | NFE2L2 |
| NFATC1 | NKG7 |
| NFKBIE | NPC1 |
| NME1 | NUCB2 |
| OSBPL10 | P4HA1 |
| PBP | PRKCD |
| PLK3 | PTPRC |
| POLE2 | RBM12 |
| PRKCB1 | RORA |
| PTPN7 | S100A10 |
| RASA1 | SAFB |
| RASGRF1 | SERPINA1 |
| SH3BP5 | SERPINB1 |
| SLC38A3 | SFRS9 |
| SPAP1 | SLC20A1 |
| SYK | SORL1 |
| TCL1A | STAT5B |
| TFF3 | SYBL1 |
| TNFRSF7 | TEGT |
| TOSO | TES |
| TRAF5 | TGFBR2 |
| UNG | TIMP1 |
| WNT10A | TNFSF10 |
| ZNF177 | TOP2B |
| | TRA1 |
| | TYROBP |
| | WARS |
| | ZBTB16 |

TABLE 38
TCL Signature (≧2-fold relative to control) [92 genes]

| Overexpressed | Underexpressed |
|---|---|
| Symbol | Symbol |
| AKR1C1 | 13CDNA73 |
| BAD | BACH2 |
| CCL19 | BANK1 |
| CCL8 | BCL6 |
| CDC6 | BTK |
| CDCA4 | CCNG2 |
| CDK4 | CD69 |
| CDKN1A | CD79B |
| CKS1B | CLECSF2 |
| CKS2 | CYBB |
| DBN1 | DGKD |
| DHCR24 | EBI2 |
| DNMT3B | EIF4A2 |
| DXS9879E | FCER2 |
| E2F2 | IFI16 |
| FAP | ITGB1 |
| GSTT1 | KLRK1 |
| H2AFX | LOC54103 |
| HLA-DQA1 | LOC90925 |
| IL15RA | LTBP1 |
| IL6 | LY64 |
| KIAA0992 | LY86 |
| LARGE | LYN |
| MAD2L1 | MIR |
| MCM4 | MLLT2 |
| MT1G | MS4A1 |
| MT1H | NAP1L1 |
| NID2 | NAPSA |
| NME1 | NFATC1 |
| PARD3 | NFE2L2 |
| PNAS-4 | NUCB2 |
| POLE2 | PDCD4 |
| POSTN | PRDM2 |
| PSPH | PTPRC |
| RAMP3 | SAFB |
| SLC38A3 | SELL |
| TIMP1 | SERPINB1 |
| TPM4 | SFRS9 |
| UBE2J1 | SORL1 |
| WNT5B | SP110 |
| | SPAP1 |
| | STARD7 |
| | SWAP70 |
| | SYK |
| | TCL1A |
| | TEGT |
| | TES |
| | TGFBR2 |
| | TGFBR3 |
| | TLE1 |
| | TNFSF10 |
| | ZNF91 |

TABLE 39
CLL Signature (≧5-fold relative to control) [66 genes]

| | |
|---|---|
| Overexpressed | Underexpressed |

| | GenBank ™ | | GenBank ™ |
|---|---|---|---|
| Symbol | Accession No. | Symbol | Accession No |
| BAIAP2L1 | NM_018842.3 | ANXA1 | NM_000700.1 |
| C3orf6 | AK055652.1 | BCL2A1 | NM_000484.2 |
| CD74 | NM_004355.1 | CCNA2 | NM_004049.2 |
| CDCA7 | NM_031942.3 | CD24 | NM_001237.2 |
| CDKN3 | NM_005192.2 | CDC2 | NM_013230.1 |
| CLIC5 | NM_016184.2 | CSF3R | NM_001786.2 |
| CNN3 | AL049313.1 | ENTPD1 | NM_156038.2 |
| COL1A2 | NM_001839.2 | EN1 | NM_001776.3 |
| CX3CR1 | NM_000089.3 | APP | NM_212474.1 |
| ENPP2 | NM_001337.2 | STMN1 | NM_005531.1 |
| GATA3 | NM_006209.2 | IFI16 | NM_001558.2 |
| HCK | NM_002051.2 | IL10RA | NM_007360.1 |
| IGFBP7 | NM_002110.2 | KLRK1 | NM_000237.1 |
| ITGAL | NM_001553.1 | LPL | NM_002341.1 |
| LGALS2 | T28925.1 | LTB | NM_002358.2 |
| LGALS3 | NM_006498.1 | MAD2L1 | NM_021038.3 |
| LOC54103 | NM_002306.1 | MBNL1 | NM_002619.1 |
| MT1H | AI523104.1 | PF4 | NM_002692.2 |
| NK4 | T66903.1 | POLE2 | NM_006115.3 |
| NKG7 | NM_005951.1 | PRAME | NM_004577.3 |
| PLA2G7 | NM_004221.3 | PSPH | NM_005608.1 |
| PLAU | NM_005601.3 | PTPRCAP | NM_015149.2 |
| PON2 | NM_005084.2 | RGL1 | NM_003821.4 |
| PPBP | NM_002658.1 | RIPK2 | NM_005621.1 |
| PRKCD | NM_000305.1 | S100A12 | NM_006748.1 |
| SPAP1 | NM_002704.2 | SLA | U90916.1 |
| SPIB | NM_006254.3 | SORL1 | NM_005563.3 |
| STAT1 | NM_030764.2 | SWAP70 | AB014540.1 |
| TCF4 | NM_003121.1 | TFRC | NM_003234.1 |
| TLE1 | AK022231.1 | TRAF1 | NM_005658.2 |
| TNFSF10 | AI307786.1 | ZAP70 | NM_001079.3 |
| TRIP6 | NM_005077.3 | | |
| TYROBP | NM_003810.2 | | |
| CLECSF6 | NM_003302.1 | | |
| LILRB1 | NM_003332.2 | | |

### 4. Profiling of Hematological Cancers

[0218] The HCP system of the present invention provides for the profiling of a hematological cancer in a subject with respect to one or more features of the hematological cancer. Hematological cancers that can be profiled using the system of the present invention are selected from the group of lymphoma or leukemia. The information provided by the hematological cancer profiling methods has a number of applications, for example, in disease prognosis, diagnosis, staging or grading, treatment management, monitoring of disease progression, predicting disease outcome or complications, pharmacogenomics, and the like. Treatment management, for example, includes selecting the most appropriate drug(s) or other therapy for effective treatment of the hematological cancers. Predicting disease outcome can involve, for example, predicting a patient's chance of survival, relapse, or the likelihood of disease progression.

[0219] For example, the expression pattern of genes in one or more HCP sets in a test sample obtained from a patient suspected of having a hematological cancer can be compared to the expression pattern of genes in the same HCP set(s) in samples from control subjects. Examples of control subjects include, but are not limited to, subjects known to have a specific hematological cancer, healthy subjects, subjects having a hematological cancer at a defined stage or grade, subjects having drug-resistant, multi-drug resistant or drug-sensitive hematological cancer, subjects undergoing a defined chemotherapy regimen, untreated subjects having a hematological cancer, subjects having a specific subtype of a hematological cancer, and the like. Similarly, for some treatments with known side effects, the HCP combination can be employed to “fine tune” the treatment regimen. A dosage is established that causes a change in gene expression patterns indicative of successful treatment. Expression patterns associated with undesirable side effects are avoided. This approach may be more sensitive and rapid than waiting for the patient to show inadequate improvement, or manifest symptoms, before altering the course of treatment.

[0220] As the HCP combinations of the present invention allow for the simultaneous investigation of several features of a hematological cancer in a single assay, the information obtained from a single assay may be applicable in several areas. Thus, the HCP system of the present invention provides for methods of diagnosing a hematological cancer, typing a hematological cancer, monitoring progression of a hematological cancer, monitoring the rate of progression of a hematological cancer, predicting therapeutic outcome, determining prognosis, monitoring response to treatment, predicting survival, selecting appropriate drug(s) and/or therapies for treatment, and combinations thereof.

[0221] In addition, the present invention also contemplates that the methods can be used in drug discovery and development, toxicological and carcinogenicity studies, forensics, and the like, wherein the test sample may be taken from either an in vitro cell culture, or from a human or other animal subject. For example, expression patterns relating to the effects of currently available therapeutic drugs can be investigated. Test samples obtained from individuals treated with these drugs can be analyzed and compared to samples from untreated patients. In this way, an expression pattern of known therapeutic agents will be developed. Knowing the identity of sequences that are differentially regulated in the presence and absence of a drug will allow researchers to elucidate the molecular mechanisms of action of that drug. Similarly, large numbers of candidate drugs can be screened based on the expression pattern similar to those of known therapeutic drugs, with the expectation that molecules with the same expression profile will likely have similar therapeutic effects. Thus, the invention provides the means to determine the molecular mode of action of a drug.

### 5. Other Uses of the HCP Combinations

[0222] The HCP system of the present invention further provides for the nucleotide sequences of the HCP combination in computer-readable media for in silico applications and as a basis for the design of gene-specific primers for amplification of one or more genes of an HCP set.

[0223] Gene-specific primers based on the nucleotide sequences of genes of the HCP sets of the system can be designed for use in amplification of the genes of the HCP set. For use in amplification reactions such as PCR, a pair of primers will be used. The exact composition of the primer sequences is not critical to the invention, but for most applications the primers will hybridize to specific genes of the HCP set under stringent conditions, particularly under conditions of high stringency, as known in the art. The pairs of primers are usually chosen so as to generate an amplification product of at least about 50 nucleotides, more usually at least about 100 nucleotides. Algorithms for the selection of primer sequences are generally known, and are available in commercial software packages. These primers may be used in standard quantitative or qualitative PCR-based assays to assess gene expression levels of genes of the HCP set. Alternatively, these primers may be used in combination with probes, such as molecular beacons, as described supra, in amplifications using real-time PCR.

### 6. HCP Profiling Kits and Packages and Computer-Readable Media

[0224] The present invention further provides for kits and packages for the profiling of hematological cancers in a subject comprising the probes of an HCP combination. The probes can be provided in the kit immobilized to a solid substrate (i.e. as an HCP array) or in the form of isolated nucleic acids suitable for use in solution hybridization assays, or in the preparation of an HCP array. Where appropriate, the HCP probes provided in the kit may incorporate a detectable label, such as a fluorophore, radioactive moiety, enzyme, biotin/avidin label, chromophore, chemiluminescent label, or the like, or the kit may include reagents for labeling the probes. The probes can be provided in separate containers or pre-dispensed into a convenient format for subsequent use, for example, into microtitre plates.

[0225] The kits can optionally include additional reagents, such as buffers, salts, enzymes, enzyme co-factors, substrates, labels, detection reagents, and the like. Other components, such as buffers and solutions for the isolation, treatment or amplification of a test sample, may also be included in the kit, for example, the kit may contain reagents for reverse transcription, transcription and/or PCR, including enzymes, primers and nucleotides. The kit may additionally include one or more controls. One or more of the components of the kit may be lyophilised and the kit may further comprise reagents suitable for the reconstitution of the lyophilised components.

[0226] The various components of the kit are provided in suitable containers. Where appropriate, the kit may also optionally contain reaction vessels, mixing vessels and other components that facilitate the preparation of reagents or the test sample.

[0227] The kit can optionally include instructions for use, which may be provided in paper form or in computer-readable form, such as a disc, CD, DVD or the like.

[0228] The present invention further contemplates that the kits described above may be provided as part of a package that includes computer software to analyze the gene expression patterns generated from the use of the kit.

[0229] The present invention further provides a computer-readable medium comprising one or more digitally-encoded HCP signatures, each signature being associated with one or more values and each value representing the expression of a gene represented by the HCP signature which is correlated with a feature of the hematological cancer represented by the HCP signature. Such a computer-readable medium can be used as a reference to compare the expression profile for the genes of a HCP signature generated from profiling a test sample. The digitally-encoded HCP signatures can be comprised in a database (such as the database described in U.S. Pat. No. 6,308,170).

[0230] The invention will now be described with reference to specific examples. It will be understood that the following examples are intended to describe embodiments of the invention and are not intended to limit the invention in any way.

### EXAMPLES

### Example 1

### Selection of Genes for an HCP Set Specific for DLBCL

[0231] Genetic profiling studies of hundreds of DLBCL patient samples has distinguished several subtypes of DLBCL: a type derived from differentiated activated peripheral blood b-cells (ABC), a second type derived from the undifferentiated germinal centers of lymph nodes (GC), a third type called Mediastinal Large B-Cell Lymphoma (MLBCL), and a fourth category that remains largely heterogeneous (Rosenwald A, Wright G, Chan W C et al. N Engl J Med. 2002; 346(25):1937-47; Rosenwald A, Wright G, Leroy K. et al. J Exp Med. 2003; 198(6):851-62; Wright G, Tan B, Rosenwald A, et al. Proc Natl Acad Sci USA. 2003; 100(17):9991-6; Savage K J, Monti S, Kutok J L, et al. Blood. 2003; 102(12):3871-9). These studies show that patients with GC-DLBCL have a significantly better survivability than patients with ABC-DLBCL. Savage et al. also presented a genetic signature for MLBCL that allows it to be distinguished from DLBCL.

[0232] Genes specific for DLBCL were selected by mining public databases. The genes are listed in Table 6 and include genes in the following categories.

[0233] ABC vs. GC DLBCL: These genes distinguish between ABC and GC subtypes of DLBCL. Each one of these two subtypes of DLBCL express genes with a specific expression pattern. The genes chosen for this section are unique to either ABC or GC DLBCL and can therefore be used to distinguish the two diseases, as described in Alizadeh A A, Eisen M B, Davis R E et al. Nature. 2000; 403(6769):503-11; Rosenwald A, Wright G, Chan W C et al. N Engl J Med. 2002; 346(25):1937-47; Wright G, Tan B, Rosenwald A, et al. Proc Natl Acad Sci USA. 2003; 100(17):9991-6; Shipp M A, Ross K N, Tamayo P et al. Nat Med. 2002 January; 8(1):68-74; and Pan Z, Shen Y, Du C, et al. Am J Pathol. 2003; 163(1):135-44.

[0234] DLBCL vs. FL: FL is closely related to DLBCL. The genes in the DLBCL vs. FL section allow identification of the two major types of disease, as well as give us the ability to predict whether or not a particular FL will progress into the more aggressive DLBCL (Shipp M A, Ross K N, Tamayo P et al. Nat Med. 2002 January; 8(1):68-74; Lossos I S, Alizadeh A A, Diehn M, et al. Proc Natl Acad Sci USA. 2002; 99(13):8886-91; de Vos S, Hofmann W K, Grogan T M, et al. Lab Invest. 2003; 83(2):271-85).

[0235] MLBCL vs. DLBCL: Similar to the last category, these genes separate DLBCL from Mediastinal Large B-cell Lymphoma (Savage K J, Monti S, Kutok J L, et al. Blood 2003; 102(12):3871-9; Kossakowska A E, Urbanski S J, Watson A, et al. Oncol Res. 1993; 5(1):19-28).

[0236] SURVIVAL: Shipp et al. correlated patient survival with a group of 96 marker genes; these genetic markers have the ability to predict a patient's life expectancy with significance and have therefore been included in our chip (Shipp M A, Ross K N, Tamayo P et al. Nat Med. 2002 January; 8(1):68-74).

[0237] Other genes, such as those described in Nishiu M, Yanagawa R, Nakatsuka S, et al. Jpn J Cancer Res. 2002; 93(8):894-901, can also be selected indicate the advancement of DLBCL within the sample.

### Example 2

### Selection of Genes for an HCP Set Specific for FL

[0238] Follicular lymphoma is an indolent or slow growing cancer that is the result of a t(14;18) translocation mutation in genomic DNA. FL accounts for 25-40% of all non-Hodgkin's lymphomas. Though FL is slow growing and 60-70% of patients live longer than five years after diagnosis, it is nonetheless incurable; patients endure continued relapse and decreased sensitivity to therapy until succumbing to disease. FL transforms into a more aggressive form of large b-cell lymphoma in 25-60% of patients (Lossos I S, Alizadeh A A, Diehn M, et al. Proc Natl Acad Sci USA. 2002; 99(13):8886-91).

[0239] Lossos et al. performed genetic profiling experiments on FL patients and tracked their progress to observe transformation into DLBCL. They found that follicular lymphomas that transformed into DLBCL de-regulated a particular gene signature that could be identified by microarray analysis. The genes chosen for this section have been shown to predict which cases will transform from FL into DLBCL. Several other teams have investigated the gene expression profile of FL in comparison with DLBCL, Burkitt's lymphoma and normal germinal center B-cells. Some of the genes in this set form a signature pattern enabling diagnostic separation of FL tissue from healthy samples and several other types of lymphoma (Shipp M A, Ross K N, Tamayo P et al. Diffuse large B-cell lymphoma outcome prediction by gene-expression profiling and supervised machine learning. Nat Med. 2002 January; 8(1):68-74; Lossos I S, Alizadeh A A, Diehn M, et al. Proc Natl Acad Sci USA. 2002; 99(13):8886-91; Maesako Y, Uchiyama T, Ohno H. Cancer Sci. 2003: 94(9):774-81; Ghia P, Boussiotis V A, Schultze J L, et al. Blood. 1998; 91(1):244-51; Akasaka T, Lossos I S, Levy R. Blood. 2003; 102(4):1443-8; Elenitoba-Johnson K S, Gascoyne R D, Lim M S, et al. Blood 1998; 91(12):4677-85).

[0240] Genes specific for FL were selected by mining public databases. The genes are listed in Table 7 and include genes in the following categories.

[0241] DLBCL vs. FL: The genes in the DLBCL vs. FL section allow identification of the two major types of disease, and the prediction of whether or not a particular FL will progress into the more aggressive DLBCL (Shipp M A, Ross K N, Tamayo P et al. Nat Med. 2002 January; 8(1):68-74; Lossos I S, Alizadeh A A, Diehn M, et al. Proc Natl Acad Sci USA. 2002; 99(13):8886-91; Husson H, Carideo E G, Neuberg D, et al. Blood. 2002; 99(1):282-9; Lestou V S, Gascoyne R D, Sehn L, et al. Br J Haematol. 2003; 122(5):745-59; Ghia P, Boussiotis V A, Schultze J L, et al. Blood. 1998; 91(1):244-51).

[0242] BCL6 TRANSLOCATION PARTNERS The t(14;18) translocation mutation characteristic of FL deregulates the BCL6 gene. The genes contained in this set are linked closely with BCL6 and thus may be deregulated following the initial mutation. Expression data from these genes may show that they are important in the FL signature (Akasaka T, Lossos I S, Levy R. Blood. 2003; 102(4):1443-8).

[0243] FL vs. BURKITT'S Maesako et al., discovered a subset of genes that were deregulated when expression data of either FL or Burkitt's lymphomas were compared. Genes in this set will help separate FL samples from Burkitt's (Maesako Y, Uchiyama T, Ohno H. Cancer Sci. 2003; 94(9):774-81).

### Example 3

### Selection of Genes for an HCP Set Specific for CLL

[0244] Chronic Lymphocytic Leukemia is the most common type of human leukemia representing 30% of adult leukemia (Hamblin T J, Davis Z, Gardiner A, et al. Blood. 1999; 94(6):1848-54). In similar fashion to DLBCL and FL, the clinical outcome of CLL patients can vary greatly. Hamblin and his colleagues (1999) discovered that the overall survival of patients afflicted with this disease is correlated with the mutational status of the immunoglobulin V(H) genes; CLL patients whose cells had unmutated Ig V(H) cells had poorer clinical outcomes than patients whose B-cells had already undergone somatic mutation (Hamblin T J, Davis Z, Gardiner A, et al. Blood. 1999; 94(6): 1848-54).

[0245] Thus, CLL is a heterogeneous disease with at least two subtypes that are molecularly distinguishable. The genes chosen for this section reflect this hypothesis and have been selected because they were found to be related to both survival and Ig mutational status. Analyzing the expression pattern of genes selected for this set will make it possible to distinguish indolent and aggressive forms, thus assisting clinicians in forming an accurate and suitable treatment regimen (Rosenwald A, Alizadeh A A, Widhopf G, et al. J Exp Med. 2001; 194(11):1639-47; Hamblin T J, Davis Z, Gardiner A, et al. Blood. 1999; 94(6):1848-54; Damle R N, Wasil T, Fais F, et al. Blood. 1999; 94(6):1840-7; Wiestner A, Rosenwald A, Barry T S, et al. Blood. 2003; 101(12):4944-51; Nagy B, Ferrer A, Larramendy M L, et al. Haematologica. 2003; 88(6):654-8; Cro L, Guffanti A, Colombi M, et al. Leukemia. 2003; 17(1):125-32; Thieblemont C, Chettab K, Felman P, et al. Leukemia. 2002; 16(11):2326-9; Korz C, Pscherer A, Benner A, et al. Blood. 2002; 99(12):4554-61).

[0246] Genes specific for CLL were selected by mining public databases. The genes are listed in Table 5 and include genes in the following categories.

[0247] MUTATIONAL STATUS These genes are differentially regulated between IgV mutated and unmutated CLLs and allow us to differentiate between the two. Since IgV mutation has also been correlated with survival, these genes may also serve as prognostic markers (Rosenwald A, Alizadeh A A, Widhopf G, et al. J Exp Med. 2001; 194(11):1639-47).

[0248] CLL vs. DLBCL A number of genes were discovered to distinguish between CLL and DLBCL (Rosenwald A, Alizadeh A A, Widhopf G, et al. J Exp Med. 2001; 194(11):1639-47; Wiestner A, Rosenwald A, Barry T S, et al. Blood. 2003; 101(12):4944-51; Korz C, Pscherer A, Benner A, et al. Blood. 2002; 99(12):4554-61).

[0249] CLL vs. MCL Korz et al., performed real time reverse transcription PCR analysis on a number of genes and discovered those that were significantly deregulated between MCL and CLL (Thieblemont C, Chettab K, Felman P, et al. Leukemia. 2002; 16(11):2326-9; Korz C, Pscherer A, Benner A, et al. Blood. 2002; 99(12):4554-61).

### Example 4

### Selection of Genes for an HCP Set Specific for MCL

[0250] Mantle Cell Lymphoma affects 6% of non-Hodgkin's patients but accounts for a disproportionately larger number of deaths because it is an incurable malignancy. Within the population affected by the disease, some patients succumb in under a year while others survive for much longer. The median survival for patients with MCL is approximately 3 years (Rosenwald A, Wright G, Leroy K. et al. J Exp Med. 2003; 198(6):851-62). Rosenwald et al. and Martinez et al (Martinez N, Camacho F I, Algara P, et al. Cancer Res. 2003; 63(23):8226-32) have performed gene expression analysis on a number of samples and have correlated survivability with the up or down regulation of certain genes. Rosenwald and his team discovered that by observing the expression of 20 genes that function to govern the proliferation, or rate of growth and multiplication of cells, one is able to predict a patient's survival on a significantly accurate level. Martinez and her team performed a similar study and discovered 25 different genes that were able to perform a similar function.

[0251] MCL also has a subtype known as MCL-BV for Mantle Cell Lymphoma Blast Variant. MCL-BV has been shown to be more aggressive and result in poorer clinical outcome than non BV MCL. A paper by de Vos lays out the genes deregulated in MCL-BV that are correlated with more aggressive progression of disease. Other genes in this set have been discovered to be differentially regulated between MCL and other lymphomas such as DLBCL, MZL, and CLL. The expression pattern of genes selected for MCL may allow diagnosis of MCL from a variety of other lymphomas and result in an accurate prognosis based on the expression of certain molecular markers (Rosenwald A, Wright G, Leroy K. et al. J Exp Med. 2003; 198(6):851-62; de Vos S, Hofmann W K, Grogan T M, et al. Lab Invest. 2003; 83(2):271-85; Thieblemont C, Chettab K, Felman P, et al. Leukemia. 2002; 16(11):2326-9; Korz C, Pscherer A, Benner A, et al. Blood. 2002; 99(12):4554-61; Robetorye R S, Bohling S D, Morgan J W, et al. J Mol Diagn. 2002; 4(3):123-36; Martinez N, Camacho F I, Algara P, et al. Cancer Res. 2003; 63(23):8226-32; Kobayashi T, Yamaguchi M, Kim S, et al. Cancer Res. 2003; 63(1):60-6).

[0252] Genes specific for MCL were selected by mining public databases. The genes are listed in Table 9 and include genes in the following categories.

[0253] SIGNATURE The genes as described in Thieblemont C, Chettab K, Felman P, et al. Leukemia. 2002; 16(11):2326-9; Korz C, Pscherer A, Benner A, et al. Blood. 2002; 99(12):4554-61; Robetorye R S, Bohling S D, Morgan J W, et al. J Mol Diagn. 2002; 4(3):123-36; and Kobayashi T, Yamaguchi M, Kim S, et al. Cancer Res. 2003; 63(1):60-6, have been shown to be deregulated between a MCL and a variety of other lymphomas (MZL, CLL, DLBCL) and thus should be able to distinguish an MCL positive sample.

[0254] MCL vs. MCL-BV Genes as described in de Vos S, Hofmann W K, Grogan T M, et al. Lab Invest. 2003; 83(2):271-85, distinguishes between the aggressive MCL-BV or the more indolent form, MCL.

[0255] SURVIVAL Certain genetic markers have been correlated with a patient's overall survival after diagnosis. The genes incorporated into this section of the chip will be able to give a patient a prognosis based, not only on morphological studies, but on minute molecular changes (Rosenwald A, Wright G, Leroy K. et al. J Exp Med. 2003; 198(6):851-62; Martinez N, Camacho F I, Algara P, et al. Cancer Res. 2003; 63(23):8226-32).

### Example 5

### Selection of Genes for an HCP Set Specific for HL

[0256] Hodgkin's lymphoma has a fairly good prognosis with a 20 percent mortality rate (Devilard E, Bertucci F, Trempat P, et al. Oncogene. 2002; 21(19):3095-102). Diagnosis of this disease still relies on the observance of a particular type of cell morphology. The expression pattern of genes selected for inclusion in this set will allow diagnosis without the need for microscopy (Devilard E, Bertucci F, Trempat P, et al. Oncogene. 2002; 21(19):3095-102; Kuppers R, Klein U, Schwering I, et al. J Clin Invest. 2003; 111(4):529-37; Thorns C, Gaiser T, Lange K, et al. Pathol Int. 2002; 52(9):578-85).

[0257] Genes specific for HL were selected by mining public databases. The genes are listed in Table 8 and include genes in the following categories.

[0258] SIGNATURE Hodgkin's lymphoma is characterized by the presence of Reed-Sternberg cells. The genes selected for this section are genes that have been compared to various other types of lymphoma and have been found to be specific to Reed Sternberg cells and thus to Hodgkin's lymphoma (Kuppers R, Klein U, Schwering I, et al. J Clin Invest. 2003; 111(4):529-37).

[0259] SURVIVAL Devilard et al., related patient survival to a number of genes, all of which have been included in this set (Devilard E, Bertucci F, Trempat P, et al. Oncogene. 2002; 21(19):3095-102).

[0260] HL vs. ALCL This section distinguishes HL from a similar non-Hodgkin's lymphoma, ALCL (Thorns C, Gaiser T, Lange K, et al. Pathol Int. 2002; 52(9):578-85).

### Example 6

### Selection of Genes for an HCP Set Specific for ALCL

[0261] Anaplastic Large Cell Lymphoma is of T-cell origin and is a disease observed primarily amongst children (Villalva et al., Br J Haematol. 2002; 118(3):791-8). The majority of ALCLs bear a translocation at t(2;5)(p23;q35) that involve both the nucleophosmin (NPM) and anaplastic lymphoma kinase (ALK) genes. A number of diagnostic markers have also been discovered (Thorns C, Gaiser T, Lange K, et al. Pathol Int. 2002; 52(9):578-85; Villalva C, Trempat P, Greenland C, et al. Br J Haematol. 2002; 118(3):791-8; Wellmann A, Thieblemont C, Pittaluga S, et al. Blood. 2000 Jul. 15; 96(2):398-404; Nishikori M, Maesako Y, Ueda C, et al. Blood. 2003; 101(7):2789-96).

[0262] Genes specific for ALCL were selected by mining public databases. The genes are listed in Table 4 and include genes in the following categories.

[0263] ALCL vs. HL These genes distinguish HL from a similar non-Hodgkin's lymphoma, ALCL (Thorns C, Gaiser T, Lange K, et al. Pathol Int. 2002; 52(9):578-85).

[0264] ALK+ vs. ALK− These genes make a distinction between ALK bearing ALCLs from ALCL lacking samples (Villalva C, Trempat P, Greenland C, et al. Br J Haematol. 2002; 118(3):791-8).

### Example 7

### Design and Selection of Nucleotide Sequences Suitable for the Preparation of Polynucleotide Probes from an HCP Set

[0265] Nucleotide sequences suitable for the preparation of polynucleotide probes from an HCP set were selected based on the following criteria. The sequences selected were based on regions of the target gene in the HCP set that were 30 or 50 nucleotides in length, and had between 25 and 75% G+C content. The sequences were additionally selected such that self-complementary interactions were minimized. Nucleotide sequences thus selected that can be used for preparation of polynucleotide probes are found in Tables 25-28.

### Example 8

### Selection of Polynucleotide Probes for Preparation of a Small 50Mer Nucleic Acid Array

[0266] 234 50mer polynucleotide probes were selected for the preparation of a small array for profiling lymphoma. Polynucleotide probes to be used in the preparation of this array were selected as described in example 7, and were designed to be 50 nucleotides in length. The nucleotide sequences of the polynucleotide probes selected for the preparation of this array are listed in Table 25.

### Example 9

### Selection of Polynucleotide Probes for Preparation of a Small 30Mer Nucleic Acid Array

[0267] 248 30mer polynucleotide probes were selected for the preparation of a small array for profiling lymphoma. Polynucleotide probes to be used in the preparation of this array were selected as described in example 7, and were designed to be 30 nucleotides in length. The nucleotide sequences of the polynucleotide probes selected for the preparation of this array are listed in Table 26.

### Example 10

### Selection of Sequences for/Preparation of a Large 50Mer Nucleic Acid Array

[0268] 971 50mer polynucleotide probes were selected for the preparation of a large array for profiling lymphoma. Polynucleotide probes to be used in the preparation of this array were selected as described in example 7, and were designed to be 50 nucleotides in length. Other polynucleotide probes corresponding to genes diagnostic of lymphoma on a general level were designed and selected according to methods known in the art. All polynucleotide probe sequences chosen for the large 50mer nucleic acid array are listed in Table 27.

### Example 11

### Selection of Sequences for/Preparation of a Large 30Mer Nucleic Acid Array

[0269] 971 30mer polynucleotide probes were selected for the preparation of a large array for profiling lymphoma. Polynucleotide probes to be used in the preparation of this array were selected as described in example 7, and were designed to be 30 nucleotides in length. Other polynucleotide probes corresponding to genes diagnostic of lymphoma on a general level were designed and selected according to methods known in the art. All of the polynucleotide probe sequences chosen for the large 50mer nucleic acid array are listed in Table 28.

### Example 12

### Preparation of a Nucleic Acid Array

[0270] Small or large nucleic acid arrays can be prepared using the similar protocol.

[0271] A small 50mer nucleic acid array was prepared using UltraGAPS™ slides (Corning Life Sciences) as follows. Oligonucleotide probes with the sequences as set forth in Table 25 were synthesized and purified according to standard methods and were spotted in duplicate onto the slides at a concentration of 0.50 mg/mL using Corning's Pronto!™ Universal Spotting Solution. The slides were then incubated in a dessicator for 24-48 hours. Probes were immobilized onto the GAPS-coated surface of the slide by UV cross-linking.

### Example 13

### Preparation of Test Samples

[0272] A test sample, either a tissue or blood sample, obtained from a patient having, suspected of having, or suspected of being at risk for a hematological cancer can be prepared for use with a hematological cancer profiling array as follows.

RNA Isolation (with Qiagen RNeasy Kit, Boom et al., 1990)

[0273] 1) Approximately 20-30 mg tissue is placed in liquid nitrogen and ground thoroughly using a mortar and pestle. The ground powder and liquid nitrogen are poured into a cooled 2 ml microfuge tube. The liquid nitrogen is allowed to evaporate off without letting the samples thaw out. Approximately 600 μl of buffer RLT are added in order to disrupt the cells.

[0274] 2) Following the disruption of the cells by buffer RLT containing β-ME and guanidine thiocyanate, the cells are homogenized by passage through a 20 gauge needle.

[0275] 3) The tissue lysate is spun for 3 min at maximum speed in a microcentrifuge. The supernatant is carefully transferred to a new microcentrifuge tube by pipetting. Only the supernatant (lysate) is used in subsequent steps.

[0276] 4) Approximately 600 μl of 70% ethanol to the homogenized lysate is added and, mixed well by pipetting. It is not centrifuged as it would cause precipitation and decrease in RNA yield.

[0277] 5) Up to approximately 700 μl of the sample, including any precipitate that may have formed, is added to an RNeasy mini column placed in a 2 ml collection tube (supplied in the kit). The column is centrifuged for 15 s at ≧8000×g (≧10,000 rpm) and flow through is discarded. The collection tube is reused in step 6.

[0278] 6) Approximately 700 μl Buffer RW1 is then added to the RNeasy column and centrifuged for 15 s at ≧8000×g (≧10,000 rpm) to wash the column. Flow through is discarded alongside of the collection tube used for the first wash stage.

[0279] 7) The RNeasy column is placed into a new 2 ml collection tube (supplied). Approximately 500 μl of Buffer RPE is pipetted onto the column and it is centrifuged for 15 s at ≧8000×g (≧10,000 rpm) to wash. Flow-through is again discarded.

[0280] 8) A second volume of 500 μl Buffer RPE is added to the RNeasy column and it is centrifuged for about 2 min at ≧8000×g (≧10,000 rpm) to dry the RNeasy silica-gel membrane. As buffer RPE contains ethanol, special care is taken to ensure thorough drying and removal of all traces of ethanol.

[0281] 9) The RNeasy column is relocated to a new 1.5 ml collection tube (supplied). An appropriate amount (30-50 μl, for example) of RNase-free water is gently pipetted directly onto the center of the RNeasy silica-gel membrane and centrifuged for 1 min at ≧8000×g (≧10,000 rpm) to elute.

[0282] 10) The RNA content is then quantified by measuring the optical density of a 100× dilution and applying the following formula from Beer's law:

A₂₆₀·Dilution Factor·40=[RNA] in μg/1 ml

[0283] 11) The RNA is then qualitatively assessed by denaturing agarose gel electrophoresis with ethidium bromide staining according to methods known in the art.

### RNA Labeling (Modified Eberwine Process, Van Gelder et al., 1990)

[0284] 1) Synthesis of First Strand cDNA

[0285] 1.1 Prepare working solution of Bacterial Control mRNAs

[0286] 1.2 Prepare each total RNA sample for manual target preparation (exemplary proportions are given below):

| | | |
|---|---|---|
| 0.2-2 | μg | total RNA |
| X | μl | working solution of bacteria control mRNAs |
| | | (1 μl per 1 μg input total RNA, dilute as required) |
| 1 | μl | T7 oligo (dT) primer |
| Y | μl | nuclease-free water |
| 12 | μl | Final Volume |

[0287] 1.3 Incubate approximately 10 min in 70° C. water bath; immediately place tube on ice until cool.

[0288] 1.4 Centrifuge for 5 s to collect sample at the bottom of the tube; return tube to ice.

[0289] 1.5 Keep the tube on ice and add the following reagents to the total volume (12 μl, in the above example) of total RNA/control mRNA/primer mix from above:

| | |
|---|---|
| 2 μl | 10x first strand buffer |
| 4 μl | 5 mM dNTP mix |
| 1 μl | RNase inhibitor |
| 1 μl | reverse transcriptase |
| 20 μl | Final volume |

[0290] 1.6 Incubate 2 h in a 42° C. water bath

[0291] 1.7 Centrifuge for 5 s to collect sample at the bottom of the tube.

2) Synthesis of Second Strand cDNA

[0292] 2.1 Prepare the following second strand cDNA synthesis mix for each sample from step 2:

| Approximately 20 | μl | First strand cDNA reaction from step 1.7 |
|---|---|---|
| 63 | μl | Nuclease-free water |
| 10 | μl | 10x second strand buffer |
| 4 | μl | 5 mM dNTP mix |
| 2 | μl | DNA polymerase mix |
| 1 | μl | RNaseH |
| 100 | μl | Final Volume |

[0293] 2.2 Gently flick tube to mix then centrifuge at ≧10 000×g to combine the reactants. Incubate 2 h at 16° C. in an incubator.

[0294] 2.3 Centrifuge 5 s at maximum speed to collect sample at the bottom of the tube. Mix gently and place the tube on ice. Proceed directly to step 4 or store overnight at −20° C.

3) Purification of Double-Stranded cDNA (Qiagen, Boom et al., 1990)

[0295] 3.1 Add approximately 500 μl buffer PB to the cDNA from step 2.3 and mix gently by pipetting up and down.

[0296] 3.2 Place a QIAquick spin column into a 2 ml collection tube.

[0297] 3.3 Transfer the cDNA buffer PB solution to the QIAquick spin column.

[0298] 3.4 Centrifuge the spin column at ≧10 000×g for 30-60 s.

[0299] 3.5 Discard the flow-through. To wash the column, add 700 μl buffer PE to the column and centrifuge at ≧10 000×g.

[0300] 3.6 Discard the flow-through. To dry the column, place the QIAquick column into a new 2-ml collection tube and centrifuge at ≧10 000×g for 1 min.

[0301] 3.7 Place the QIAquick column into a clean 1.5-ml microcentrifuge tube.

[0302] 3.8 To elute the cDNA, add approximately 30 μl of EB buffer to the center of the QIAquick membrane. Let the column stand for 1 min, then centrifuge for 1 min at ≧10 000×g. Repeat once to generate a total of approximately 60 μl eluate. 3.9 Dry the cDNA solution in a SpeedVac concentrator under medium heat (approximately 1 h).

4) Synthesis of cRNA by In Vitro Transcription (IVT) Using T7 RNA Polymerase (All Measurements are Approximate)

[0303] 4.1 Make a resuspension solution by placing the following components in a new RNase-free microcentrifuge tube (approximate volumes):

| | |
|---|---|
| 9.5 μl | Nuclease-free water |
| 4.0 μl | 10X T7 reaction buffer |
| 13.5 μl | Total Volume |

[0304] 4.2 Resuspend each cDNA pellet from step 3.9 with 13.5 μl of the above resuspension solution. Pipette up and down to ensure resuspension of the pellet(s).

[0305] 4.3 Make the IVT mixture by adding the following in another RNase-free microcentrifuge tube (volumes are approximate):

| | |
|---|---|
| 4.0 μL | T7 ATP solution |
| 4.0 μL | T7 GTP solution |
| 4.0 μL | T7 CTP solution |
| 3.0 μL | T7 UTP solution |
| 7.5 μl | mM biotin-11-UTP |
| 4.0 μl | 10X T7 enzyme mix |
| 26.5 μl | Final Volume |

[0306] 4.4 Mix the components of the IVT mixture by briefly vortexing the tube. Centrifuge the tube for 5 s at ≧10 000×g. Transfer this reaction mixture (26.5 μl) into the tube of resuspended cDNA from step 4.2, and gently pipette up and down to ensure complete mixing.

[0307] 4.5 Incubate the reaction for 14 h in an air incubator at 37° C. (Water baths and open heat blocks are not recommended due to condensation on the lid of the microcentrifuge tube)

5) Recovery of Biotin Labelled cRNA (Qiagen, Boom et al., 1990) (All Measurements are Approximate)

[0308] 5.1 Prepare working solutions of the RLT and RPE buffers.

[0309] 5.2 Adjust the IVT reaction volume to approximately 100 μl by adding an appropriate volume (for example, 60 μl) of nuclease-free water.

[0310] 5.3 Add 350 μl buffer RLT to the sample and mix thoroughly by pipetting up and down.

[0311] 5.4 Add 250 μl of 100% ethanol to the reaction sample and mix well by pipetting up and down. Do not centrifuge.

[0312] 5.5 Apply the sample (700 μl) to an RNeasy spin column in a collection tube. Centrifuge for 15 s at ≧8000×g.

[0313] 5.6 Transfer the RNeasy column into a new 2-ml collection tube (supplied). Add 500 μl of buffer RPE to column and centrifuge for 15 s at ≧8000×g. Discard flow-through and reuse the collection tube. Repeat this wash step once.

[0314] 5.7 Place the RNeasy spin column into a new 2 μl collection tube and centrifuge at ≧8000×g for 2 min to dry the membrane.

[0315] 5.8 Transfer the RNeasy column into a new 1.5-ml collection tube (supplied), and pipette 50 μl of nuclease-free water directly onto the RNeasy membrane without touching the membrane.

[0316] 5.9 Incubate at ambient temperature for 10 minutes. Elute the cRNA by centrifugation at ≧8000×g for 1 min. Do not remove the column.

[0317] 5.10 Pipette another 50 μl of nuclease-free water directly onto the same RNeasy membrane.

[0318] 5.11 Incubate at ambient temperature for 10 min. Elute the cRNA (into the same tube used in step 5.8) by centrifugation at ≧8000×g for 1 min.

[0319] 5.12 Remove the column. Mix the solution by flicking the tube.

[0320] 5.13 Store the cRNA at −70° C.

6) Assessment of cRNA Concentration, Yield and Quality

[0321] The UV spectrophotometric quantitation method is described. Other methods of quality analysis involve either denaturing gel-electrophoresis or Agilent 2100 Bioanalyzer.

[0322] 6.1 Prepare a appropriate dilution (for example, 1:50) for each sample of cRNA in nuclease-free water:

| | | |
|---|---|---|
| 2 | μl | cRNA |
| 98 | μl | nuclease-free water |
| 100 | μl | Final Volume |

[0323] 6.2 Vortex the mixture and centrifuge for 5 s at ≧10 000×g to collect all fluid at the bottom of the tube.

[0324] 6.3 Transfer the cRNA dilution to a 100-μl quartz cuvette (1-cm pathlength) and measure UV absorbance at 260 nm. If the A₂₆₀ values are less than 0.15, prepare a 1:20 dilution of the cRNA and measure its UV absorbance at 260 nm. For accurate concentration determination, the dilution must yield an A260 in the linear range of approximately 0.15-0.95. If the initial reading with 1:50 dilution is not in the linear range, prepare another sample with the appropriate dilution change.

[0325] 6.4 Calculate the cRNA concentration:

1A₂₆₀ unit=40 μg/ml (1-cm pathlength cuvette):

Concentration in μg/μl=A₂₆₀×dilution factor×40 μg/ml×0.001 ml/μl

[0326] 6.5 The A₂₆₀:A₂₈₀ ratio is sensitive to pH. Thus, to accurately determine the purity of the sample, it can be buffered. Transfer the diluted cRNA from the cuvette to a new microcentrifuge tube and add 11.1 μl of 0.1 M Tris-HCl, pH 7.6. Vortex the mixture.

[0327] 6.6 Transfer the Tris-diluted cRNA (˜100 μl) to a quartz cuvette and measure UV absorbance at 260 nm and 280 nm. The A₂₆₀:A₂₈₀ ratio is a measure of sample purity and should be within 1.8-2.1.

[0328] 1.1 For each array to be loaded, bring approximately 10 μg of cRNA (from step 6.6) to a final volume of about 20 μl with nuclease-free water in a thin walled microcentrifuge tube.

[0329] 1.2 Add 5 μl of 5× buffer for each microarray. Place tube in a thermal cycler and heat for 20 min at 94° C. using the heated lid feature.

[0330] 1.3 Cool to 0° C. in the thermal cycler for at least 5 min.

### Hybridization and Washing:

[0331] 1) Fragmentation of cRNA in Preparation for Hybridisation to the Array

[0332] 1.1 For each microarray to be loaded, bring 10 μg of cRNA (from step 6.6) to a final volume of 20 μl with nuclease-free water in a thin walled microcentrifuge tube.

[0333] 1.2 Add 5 μl of 5× fragmentation buffer for each microarray. Place tube in a thermal cycler and heat for 20 min at 94° C. using the heated lid feature.

[0334] 1.3 Cool to 0° C. in the thermal cycler for at least 5 min.

### 2) Preparation of Hybridization Reaction Mixtures

[0335] 2.1 Set the temperature of the shaker-incubator to 37° C. for hybridization. Assemble microarray tray posts from the CodeLink Shaker Kit onto the incubator platform.

[0336] 2.2 For each microarray to be processed, prepare 260 μl of hybridization solution containing 10 μg of fragmented target cRNA in a 1.5-microcentrifuge tube:

| | | |
|---|---|---|
| 78 | μl | hybridization buffer component A |
| 130 | μl | hybridization buffer component B |
| 27 | μl | nuclease-free water |
| 25 | μl | fragmented cRNA (from section 1) |
| 260 | μl | total volume |

[0337] 2.3 Vortex the solution for 5 s at maximum speed. Incubate the hybridization solution at 90° C. for 5 min to denature the cRNA.

[0338] 2.4 Cool the tube(s) on ice for at least 5 and no more than 30 min. Load all microarrays within 30 min of denaturing the cRNA.

3) Loading of Reaction Mixtures into Microarray Chambers

[0339] 3.1 Set a slide shaker tray on a level surface. Place the microarrays into the shaker tray with the input/output ports facing up. Load microarrays in sets of 12 or less.

[0340] 3.2 Vortex the hybridization reaction mixture for 5 s at maximum speed. Centrifuge briefly to gather the liquid at the bottom of the tube. Place the tube back on ice.

[0341] 3.3 For each microarray, draw 250 μl into a 1-ml wide-bore pipette tip and slowly inject the entire sample into the chamber without using the blowout feature of the pipettor. Discard any excess target mix remaining in the pipette tip. Aspirate any excess fluid surrounding the outside of the port with a pipette tip and discard. Use a lint-free wipe to blot residual fluid from around the port, taking care not to actually touch the port.

[0342] 3.4 After loading up to 12 microarrays, seal the Flex Chamber ports using sealing strips and port sealing tool. Do not touch the Flex Chamber or directly depress the port.

### 4) Hybridization

[0343] 4.1 Align the 12-slide shaker tray notches with the front and back posts fixed to the shaker-incubator platform to place the loaded shaker tray into the shaker-incubator. The Flex Chamber should be facing up.

[0344] 4.2 Set the shaker speed to 300 rpm and incubate slides for 18-24 h at 37° C. It is critical that arrays used in any form of comparison are hybridized for the same amount of time within the given range.

[0345] 4.3 To prepare for the next step, fill a large reagent reservoir with 240 ml of filtered 0.75×TNT buffer. Cover the reservoir and incubate in a 46° C. water bath overnight.

### 5) Post-Hybridization Wash

[0346] 5.1 Fill each slot in the medium reagent reservoir with 13 ml of filtered 0.75×TNT. Place the microarray rack into the reservoir. Leave at ambient temperature.

[0347] 5.2 Remove the 12-slide shaker tray from the shaker incubator, and place on a level surface at ambient temperature. Process only 12 slides at a time per person. Leave the trays in the shaker until ready to process.

[0348] 5.3 Place the first microarray to be processed into the Flex Chamber removal tool.

[0349] 5.4 Remove the Flex Chamber by lifting the tab and slowly pulling it back at a 60° angle without creasing the Flex Chamber.

[0350] 5.5 Place the microarray into a slot of the microarray rack, which was placed to a medium reagent reservoir containing 0.75×TNT in step 5.1. Use the microarray position tool, tooth-side down, to ensure the microarrays are properly seated.

[0351] 5.6 To avoid potential cross-contamination, rinse the surface of the Flex Chamber removal tool with approximately 5 ml of ambient temperature 0.75×TNT buffer dispensed from a squirt bottle. Keep the medium reagent reservoir at ambient temperature until all microarrays have been processed.

[0352] 5.7 Repeat steps 5.3-5.6 for each hybridized microarray.

[0353] 5.8 Transfer the microarray rack with microarrays from the medium reagent reservoir into the pre-warmed, 0.75×TNT-filled large reagent reservoir from step 4.3. Replace the lid on the large reagent reservoir and then on the water bath. Incubate at 46° C. for exactly 1 h; longer incubation time may significantly reduce signal intensities.

Detection with Streptavidin-Dye Conjugate

[0354] 6.1 Fill each slot in the small reagent reservoir with 3.4 ml of Cy5-Streptavidin working solution. Leave at ambient temperature. Cover the small reagent reservoir with its lid to prevent photobleaching of the fluorophore by ambient light.

[0355] 6.2 Remove the microarray rack with microarrays from the large reagent reservoir at 46° C., and place into the small reagent reservoir containing the Cy5-Streptavidin working solution. Cover with the lid and incubate microarrays at ambient temperature for 30 min.

[0356] 6.3 During incubation, prepare for the wash steps by filling four large reagent reservoirs each with 240 ml of ambient temperature 1×TNT buffer.

[0357] 6.4 After the 30 min incubation, remove the microarray rack with microarrays from the staining solution and place into one large reagent reservoir containing 1×TNT buffer (prepared in 6.3). Do not drain the solution from the microarrays. Incubate at ambient temperature for 5 min, covered from light.

[0358] 6.5 Remove the microarray rack from the first large reagent reservoir with 1×TNT buffer and place into a second large reagent reservoir containing 1×TNT buffer. Again, do not attempt to drain the solution from the microarrays. Incubate at ambient temperature for 5 min, covered from light. Repeat this step with two additional large reagent reservoirs containing fresh 1×TNT buffer for a third and fourth wash.

[0359] 6.6 During the third wash, thoroughly rinse a large reagent reservoir with distilled water and dry it. Completely fill this reservoir with the final rinse 0.1×SSC/0.05% Tween 20 solution.

[0360] 6.7 Transfer the microarray rack into the large reagent reservoir completely filled with 0.1×SSC/0.05% Tween 20 at ambient temperature. Incubate the slides for 30 seconds while continually agitating mildly up and down.

[0361] 6.8 Remove the microarray rack from the large reagent reservoir and blot the bottom edge of the microarrays briefly on an absorbent paper towel. Place the microarray rack in a clean, dry medium reagent reservoir. Dry the microarrays by centrifugation in the Qiagen Sigma 4-15 C centrifuge with corresponding bucket rotor (2×96-well plate) or similar system using following settings:

### Speed: 2000 rpm (644×g)

### Acceleration: 9

### Deceleration: 9

### Time: 3 min

[0362] 6.9 Use the microarray removal tool to easily remove the microarrays from the microarray rack, and place the dry microarrays into a light-protected slide box until they are scanned. Microarrays should be scanned within two days of assay completion.

[0363] 6.10 Repeatedly rinse all reservoirs with deionized water to clean, and invert to dry.

[0364] 6.11 Wash the rack with Alconox™ soap, scrubbing between the rails with a pipe cleaner style brush. Rinse thoroughly with deionized water to remove residual soap. Air-dry the rack.

### 7) Microarray Scanning and Analysis

[0365] 7.1 Turn the scanner on 15 min prior to use.

[0366] 7.2 Slide the cover to the left to expose the slide holder.

[0367] 7.3 Lift the latch of the slide holder and lift the upper clip.

[0368] 7.4 Wearing latex gloves, load the microarray into the tray with the label side down and closest to the front of the scanner.

[0369] 7.5 Pull the clip on the left of the slide out and let the microarray fall into place. Release the clip to put pressure against the microarray.

[0370] 7.6 Grab microarray by the edges and move the microarray toward you.

[0371] 7.7 Lower upper clip and press down on the latch until it clicks.

[0372] 7.8 Slide the cover to the right to cover the slide holder.

[0373] 7.9 Open the array analysis software program and select the following settings:

### Wavelength: 635 nm

[0374] PMT voltage: 600 V
Laser power: 100%
Pixel size: 10 μm
Focus position: 0 μm

[0375] 7.10 The hematological cancer array can be scanned according to the standard protocol.

[0376] 7.11 Enter the microarray serial number and click Next. The Experiment and Scan Information interface is displayed.

[0377] 7.12 Type in the project name, experiment name, and sample name. The username is automatically captured. When opening this interface for the first time, a message box may ask whether to allow an ActiveX interaction to proceed.

[0378] 7.13 Select a setting (.gps) file. If a settings file was previously selected, the name and path are displayed under Current Settings File. To select a new file, click Browse under Select New Settings File. The values for project name, experiment name, user name, and settings file that were entered for a previous microarray are retained but may be changed.

[0379] 7.14 In the Load and Scan Slide screen, the standard TIF file name for the current microarray is displayed. If desired, the name may be changed.

[0380] 7.15 Click Browse to select the image path or the location where the image files will be stored. If a Security Alert message box is displayed.

[0381] 7.16 Click Scan Slide. The Image tab will display, and the instrument will perform the scan.

[0382] 7.17 When complete, the view will return to the Report tab.

[0383] 7.18 Click Save Image to save the scanned image at the appropriate file location.

[0384] 7.19 Slide the cover to the left and remove the microarray.

[0385] 7.20 To scan the next microarray, click New Slide and enter the serial number for the next microarray. The setting information previously entered will be retained.

[0386] 7.21 Analyze the image from each microarray using the software.

### Example 14

### Selection of Additional Genes for HCP Sets Relating to Lymphoma or Leukemia

[0387] Genes whose expression pattern is indicative of one or more features of a hematological cancer selected from the group of lymphoma and leukemia were selected for inclusion into HCP sets as follows. Initial gene selection was carried out by consulting numerous publications to identify genes that have been shown to hold diagnostic or prognostic potential for lymphoma and/or leukemia. A list of publications consulted is found below:
[0388] Staudt L M. Molecular diagnosis of the hematologic cancers. N Engl J Med. 2003; 348(18): 1777-85. [Erratum: N Engl J Med. 2003; 348(25):2588.]
[0389] Diehl V, Thomas R K, Re D. Part II: Hodgkin's lymphoma—diagnosis and treatment. Lancet Oncol. 2004; 5(1):19-26.
[0390] Soukup J, Krskova L, Mrhalova M, et al. Large-cell diffuse B-cell lymphoma: heterogenous origin and prognosis from the aspect of modern diagnosis. Cas Lek Cesk. 2003; 142(7):417-2
[0391] Guermazi A, Brice P, Hennequin C, et al. Lymphography: an old technique retains its usefulness. Radiographics. 2003; 23(6):1541-58; discussion 1559-60.
[0392] Alizadeh A A, Eisen M B, Davis R E et al. Distinct types of diffuse large B-cell lymphoma identified by gene expression profiling. Nature. 2000; 403(6769):503-11.
[0393] Harris N L, Jaffe E S, Diebold J et al. Lymphoma classification—from controversy to consensus: the R.E.A.L. and WHO Classification of lymphoid neoplasms. Ann Oncol. 2000; 11 Suppl 1:3-10.
[0394] Rosenwald A, Wright G, Chan W C et al. The use of molecular profiling to predict survival after chemotherapy for diffuse large-B-cell lymphoma. N Engl J Med. 2002; 346(25): 1937-47.
[0395] Rosenwald A, Wright G, Leroy K. et al. Molecular diagnosis of primary mediastinal B cell lymphoma identifies a clinically favorable subgroup of diffuse large B cell lymphoma related to Hodgkin lymphoma. J Exp Med. 2003; 198(6):851-62.
[0396] Wright G, Tan B, Rosenwald A, et al. A gene expression-based method to diagnose clinically distinct subgroups of diffuse large B cell lymphoma Proc Natl Acad Sci USA. 2003; 100(17):9991-6
[0397] Savage K J, Monti S, Kutok J L, et al. The molecular signature of mediastinal large B-cell lymphoma differs from that of other diffuse large B-cell lymphomas and shares features with classical Hodgkin lymphoma. Blood. 2003; 102(12):3871-9
[0398] Shipp M A, Ross K N, Tamayo P et al. Diffuse large B-cell lymphoma outcome prediction by gene-expression profiling and supervised machine learning. Nat Med. 2002 January; 8(1):68-74.
[0399] Pan Z, Shen Y, Du C, et al. Two newly characterized germinal center B-cell-associated genes, GCET1 and GCET2, have differential expression in normal and neoplastic B cells. Am J Pathol. 2003; 163(1):135-44.
[0400] Nishiu M, Yanagawa R, Nakatsuka S, et al. Microarray analysis of gene-expression profiles in diffuse large B-cell lymphoma: identification of genes related to disease progression. Jpn J Cancer Res. 2002; 93(8):894-901.
[0401] Lossos I S, Alizadeh A A, Diehn M, et al. Transformation of follicular lymphoma to diffuse large-cell lymphoma: alternative patterns with increased or decreased expression of c-myc and its regulated genes. Proc Natl Acad Sci USA. 2002; 99(13):8886-91.
[0402] de Vos S, Hofmann W K, Grogan T M, et al. Gene expression profile of serial samples of transformed B-cell lymphomas. Lab Invest. 2003; 83(2):271-85.
[0403] Kossakowska A E, Urbanski S J, Watson A, et al. Patterns of expression of metalloproteinases and their inhibitors in human malignant lymphomas. Oncol Res. 1993; 5(1):19-28.
[0404] Husson H, Carideo E G, Neuberg D, et al. Gene expression profiling of follicular lymphoma and normal germinal center B cells using cDNA arrays. Blood. 2002; 99(1):282-9.
[0405] Lestou V S, Gascoyne R D, Sehn L, et al. Multicolour fluorescence in situ hybridization analysis of t(14;18)-positive follicular lymphoma and correlation with gene expression data and clinical outcome. Br J Haematol. 2003; 122(5):745-59.
[0406] Maesako Y, Uchiyama T, Ohno H. Comparison of gene expression profiles of lymphoma cell lines from transformed follicular lymphoma, Burkitt's lymphoma and de novo diffuse large B-cell lymphoma. Cancer Sci. 2003; 94(9):774-81.
[0407] Ghia P, Boussiotis V A, Schultze J L, et al. Unbalanced expression of bcl-2 family proteins in follicular lymphoma: contribution of CD40 signaling in promoting survival. Blood. 1998; 91(1):244-51.
[0408] Akasaka T, Lossos I S, Levy R. BCL6 gene translocation in follicular lymphoma: a harbinger of eventual transformation to diffuse aggressive lymphoma. Blood. 2003; 102(4):1443-8.
[0409] Elenitoba-Johnson K S, Gascoyne R D, Lim M S, et al. Homozygous deletions at chromosome 9p21 involving p16 and p15 are associated with histologic progression in follicle center lymphoma. Blood. 1998; 91(12):4677-85.
[0410] Rosenwald A, Alizadeh A A, Widhopf G, et al. Relation of gene expression phenotype to immunoglobulin mutation genotype in B cell chronic lymphocytic leukemia. J Exp Med. 2001; 194(11):1639-47.
[0411] Hamblin T J, Davis Z, Gardiner A, et al. Unmutated Ig V(H) genes are associated with a more aggressive form of chronic lymphocytic leukemia. Blood. 1999; 94(6):1848-54.
[0412] Damle R N, Wasil T, Fais F, et al. Ig V gene mutation status and CD38 expression as novel prognostic indicators in chronic lymphocytic leukemia. Blood. 1999; 94(6): 1840-7
[0413] Wiestner A, Rosenwald A, Barry T S, et al. ZAP-70 expression identifies a chronic lymphocytic leukemia subtype with unmutated immunoglobulin genes, inferior clinical outcome, and distinct gene expression profile. Blood. 2003; 101(12):4944-51.
[0414] Nagy B, Ferrer A, Larramendy M L, et al. Lymphotoxin beta expression is high in chronic lymphocytic leukemia but low in small lymphocytic lymphoma: a quantitative real-time reverse transcriptase polymerase chain reaction analysis. Haematologica. 2003; 88(6):654-8.
[0415] Cro L, Guffanti A, Colombi M, et al. Diagnostic role and prognostic significance of a simplified immunophenotypic classification of mature B cell chronic lymphoid leukemias. Leukemia. 2003; 17(1):125-32.
[0416] Thieblemont C, Chettab K, Felman P, et al. Identification and validation of seven genes, as potential markers, for the differential diagnosis of small B cell lymphomas (small lymphocytic lymphoma, marginal zone B cell lymphoma and mantle cell lymphoma) by cDNA macroarrays analysis. Leukemia. 2002; 16(11):2326-9
[0417] Korz C, Pscherer A, Benner A, et al. Evidence for distinct pathomechanisms in B-cell chronic lymphocytic leukemia and mantle cell lymphoma by quantitative expression analysis of cell cycle and apoptosis-associated genes. Blood. 2002; 99(12):4554-61.
[0418] Robetorye R S, Bohling S D, Morgan J W, et al. Microarray analysis of B-cell lymphoma cell lines with the t(14;18). J Mol Diagn. 2002; 4(3):123-36.
[0419] Martinez N, Camacho F I, Algara P, et al. The molecular signature of mantle cell lymphoma reveals multiple signals favoring cell survival. Cancer Res. 2003; 63(23):8226-32.
[0420] Kobayashi T, Yamaguchi M, Kim S, et al. Microarray reveals differences in both tumors and vascular specific gene expression in de novo CD5+ and CD5− diffuse large B-cell lymphomas. Cancer Res. 2003; 63(1):60-6.
[0421] Devilard E, Bertucci F, Trempat P, et al. Gene expression profiling defines molecular subtypes of classical Hodgkin's disease. Oncogene. 2002; 21(19):3095-102.
[0422] Kuppers R, Klein U, Schwering I, et al. Identification of Hodgkin and Reed-Sternberg cell-specific genes by gene expression profiling. J Clin Invest. 2003; 111(4):529-37.
[0423] Thorns C, Gaiser T, Lange K, et al. cDNA arrays: gene expression profiles of Hodgkin's disease and anaplastic large cell lymphoma cell lines. Pathol Int. 2002; 52(9):578-85.
[0424] Villalva C, Trempat P, Greenland C, et al. Isolation of differentially expressed genes in NPM-ALK-positive anaplastic large cell lymphoma. Br J Haematol. 2002; 118(3):791-8.
[0425] Wellmann A, Thieblemont C, Pittaluga S, et al. Detection of differentially expressed genes in lymphomas using cDNA arrays: identification of clusterin as a new diagnostic marker for anaplastic large-cell lymphomas. Blood. 2000 Jul. 15; 96(2):398-404.
[0426] Nishikori M, Maesako Y, Ueda C, et al. High-level expression of BCL3 differentiates t(2;5)(p23;q35)-positive anaplastic large cell lymphoma from Hodgkin disease. Blood. 2003; 101(7):2789-96.
[0427] American Society of Hematology. Newly identified genes may help predict outcome in childhood leukemia. August 2003 Press Release.
[0428] Golub T R, Slonim D K, Tamayo P, Huard C, Gaasenbeek M, Mesirov J P, Coller H, Loh M L, Downing J R, Caligiuri M A, Bloomfield C D and E S Lander. Molecular classification of cancer: class discovery and class prediction by gene expression monitoring. Science 1999 Oct. 15; 286(5439): 531-537
[0429] Bhojwani D, Min D J, Raetz E and W L Carroll. NEW APPROACHES TO RISK-ADAPTED THERAPY FOR CHILDHOOD ACUTE LYMPHOBLASTIC LEUKEMIA. Hematology 2003: 102-131
[0430] National Cancer Institute Website. http://www.cancer.gov/cancerinformation/cancertype/leukemia
[0431] Downing J R. Expression Profiling In Acute Leukemia. Hematology 2003:102-131
[0432] Brunet J P, Tamayo P, Golub T R and J P Mesirov. Metagenes and molecular pattern discovery using matrix factorization. Proc Natl Acad Sci USA. 2004 Mar. 23; 101(12): 4164-4169
[0433] Ferrando A A, Neuberg D S, Staunton J, Loh M L, Huard C, Raimondi S C, Behm F G, Pui C H, Downing J R, Gilliland D G, Lander E S, Golub T R and A T Look. Gene expression signatures define novel oncogenic pathways in T cell acute lymphoblastic leukemia. Cancer Cell 2002 February; 1(1): 75-87
[0434] Reed J C. Pediatric Acute Lymphoblastic Leukemia. Hematology 2003: 102-131
[0435] Sanz L, Garcia-Marco J A, Casanova B, de La Fuente M T, Garcia-Gila M, Garcia-Pardo A and A Silva. Bcl-2 family gene modulation during spontaneous apoptosis of B-chronic lymphocytic leukemia cells. Biochem Biophys Res Commun. 2004 Mar. 12; 315(3): 562-567
[0436] Mamani-Matsuda M, Moynet D, Molimard M, Ferry-Dumazet H, Marit G, Reiffers J and M D Mossalayi. Long-acting beta2-adrenergic formoterol and salmeterol induce the apoptosis of B-chronic lymphocytic leukaemia cells. Br J Haematol. 2004 January; 124(2): 141-150
[0437] Bueso-Ramos C E, Rocha F C, Shishodia S, Medeiros L J, Kantarjian H M, Vadhan-Raj S, Estrov Z, Smith T L, Nguyeni M H and B B Aggarwal. Expression of constitutively active nuclear-kappa B RelA transcription factor in blasts of acute myeloid leukemia. Hum Pathol. 2004 February; 35(2): 246-253
[0438] Floros K V, Thomadaki H, Lallas G, Katsaros N, Talieri M and A Scorilas. Cisplatin-induced apoptosis in HL-60 human promyelocytic leukemia cells: differential expression of BCL2 and novel apoptosis-related gene BCL2L12. Ann N Y Acad Sci. 2003 December; 1010: 153-158
[0439] Armstrong S A, Staunton J E, Silverman L B, Pieters R, den Boer M L, Minden M D, Sallan S E, Lander E S, Golub T R and S J Korsmeyer. MLL translocations specify a distinct gene expression profile that distinguishes a unique leukemia. Nature Genetics 2002 January; 30(1): 41-47
[0440] Bullinger L, Dohner K, Bair E, Frohling S, Schlenk R F, Tibshirani R, Dohner H and JR Pollack. Use of Gene-Expression Profiling to Identify Prognostic Subclasses in Adult Acute Myeloid Leukemia. 2004 Apr. 15; 350(16): 1605-1616
[0441] Valk P J, Verhaak R G, Beijen M A, Erpelinck C A, Barjesteh van Waalwijk van Doom-Khosrovani S, Boer J M, Beverloo H B, Moorhouse M J, van der Spek P J, Lowenberg B and R Delwel. Prognostically useful gene-expression profiles in acute myeloid leukemia. N Engl J Med 2004 Apr. 15; 350(16): 1617-1628
[0442] Carroll W L, Bhojwani D, Min D J, Raetz E, Relling M, Davies S, Downing J R, Willman C L and J C Reed. Pediatric Acute Lymphoblastic Leukemia. Hematology 2003: 102-131
[0443] Rozovskaia T, Ravid-Amir O, Tillib S, Getz G, Feinstein E, Agrawal H and Nagler. Expression profiles of acute lymphoblastic and myeloblastic leukemias with ALL-1 rearrangements. Proc Natl Acad Sci USA. 2003 Jun. 24; 100(13): 7853-7858
[0444] Ferrando A A, Neuberg D S, Dodge R K, Paietta E, Larson R A, Wiernik P H, Rowe J M, Caligiuri M A, Bloomfield C D and A T Look. Prognostic importance of TLX1 (HOX11) oncogene expression in adults with T-cell acute lymphoblastic leukaemia. Lancet. 2004 Feb. 14; 363(9408): 535-536.
[0445] Galimberti S, Guerrini F, Carulli G, Fazzi R, Palumbo G A, Morabito F and M Petrini. Significant co-expression of WT1 and MDR1 genes in acute myeloid leukemia patients at diagnosis. Eur J Haematol. 2004 January; 72(1): 45-51
[0446] Willman C L. Pediatric Acute Lymphoblastic Leukemia. Hematology 2003: 102-131 Ross M E, Zhou X, Song G, Shurtleff S A, Girtman K, Williams W K, Liu H C, Mahfouz R, Raimondi S C, Lenny N, Patel A and J R Downing. Classification of pediatric acute lymphoblastic leukemia by gene expression profiling. Blood 2003 Oct. 15; 102(8): 2951-2959
[0447] Moos P J, Raetz E A, Carlson M A, Szabo A, Smith F E, Willman C, Wei Q, Hunger S P and W L Carroll. Identification of gene expression profiles that segregate patients with childhood leukemia. Clin Cancer Res. 2002 October; 8(10): 3118-3130
[0448] Health A to Z website www.healthatoz.com/healthatoz/Atoz/ency/leukemias_chronic.jsp
[0449] BC Cancer Agency website
[0450] American Cancer Society website
[0451] Mackey J R, Galmarini C M, Graham K A, Joy A A, Delmer A, Dabbaugh L, Glubrecht D, Jewell L D, Lai R, Lang T, Young J D, Merle-Beral H, Binet J L, Cass C E and C Dumontet. Quantitative analysis of nucleoside transporter and metabolism gene expression in chronic lymphocytic leukemia (CLL)-identification of fludarabine-sensitive and insensitive populations. Blood 2005 Jan. 15; 105(2): 767-774
[0452] Vallat L, Magdelenat H, Merle-Beral H, Masdehors P, Potocki de Montalk G, Davi F, Kruhoffer M, Sabatier L, Orntoft T F and J Delic. The resistance of B-CLL cells to DNA damage-induced apoptosis defined by DNA microarrays. Blood 2003 Jun. 1; 101(11): 4598-4606
[0453] Chiaretti S, Li X, Gentleman R, Vitale A, Vignetti M, Mandelli F, Ritz J and R Foa. Gene expression profile of adult T-cell acute lymphocytic leukemia identifies distinct subsets of patients with different response to therapy and survival. Blood. 2004 Apr. 1; 103(7): 2771-2778
[0454] Baldus C D, Liyanarachchi S, Mrozek K, Auer H, Tanner S M, Guimond M, Ruppert A S, Mohamed N, Davuluri R V, Caligiuri M A, Bloomfield C D and A de la Chapelle. Acute myeloid leukemia with complex karyotypes and abnormal chromosome 21: Amplification discloses overexpression of APP, ETS2, and ERG genes. Proc Natl Acad Sci USA. 2004 Mar. 16; 101(11): 3915-3920
[0455] Cario G, Stanulla M, Fine B M, Teuffel O, V Neuhoff N, Schrauder A, Flohr T, Schafer B W, Bartram C R, Welte K, Schlegelberger B and M Schrappe. Distinct gene expression profiles determine molecular treatment response in childhood acute lymphoblastic leukemia. Blood. 2004 Sep. 23; [Epub ahead of print]
[0456] Dohner H, Stilgenbauer S, Benner A, Leupolt E, Krober A, Bullinger L, Dohner K, Bentz M and P Lichter. Genomic aberrations and survival in chronic lymphocytic leukemia. N Engl J Med. 2000 Dec. 28; 343(26): 1910-1916
[0457] Ferrer A, Ollila J, Tobin G, Nagy B, Thunberg U, Aalto Y, Vihinen M, Vilpo J, Rosenquist R and S Knuutila. Different gene expression in immunoglobulin-mutated and immunoglobulin-unmutated forms of chronic lymphocytic leukemia. Cancer Genet Cytogenet. 2004 August; 153(1): 69-72
[0458] Ghobrial I M, Bone N D, Stenson M J, Novak A, Hedin K E, Kay N E and S M Ansell. Expression of the chemokine receptors CXCR4 and CCR7 and disease progression in B-cell chronic lymphocytic leukemia/small lymphocytic lymphoma. Mayo Clin Proc. 2004 March; 79(3): 318-25
[0459] Galimberti S, Guerrini F, Palumbo G A, Consoli U, Fazzi R, Morabito F, Santini V and M Petrini. Evaluation of BCRP and MDR-1 co-expression by quantitative molecular assessment in AML patients. Leuk Res. 2004 April; 28(4): 367-372
[0460] Gery S, Park D J, Vuong P T, Chih D Y, Lemp N and H P Koeffier. Expression of C/EBP Homologous Protein (CHOP) is Regulated by Retinoic Acid, and CHOP Negatively Regulates Myeloid Target Genes.
[0461] Graux C, Cools J, Melotte C, Quentmeier H, Ferrando A, Levine R, Vermeesch J R, Stul M, Dutta B, Boeckx N, Bosly A, Heimann P, Uyttebroeck A, Mentens N, Somers R, MacLeod R A, Drexler H G, Look A T, Gilliland D G, Michaux L, Vandenberghe P, Wlodarska I, Marynen P and A Hagemeijer. Fusion of NUP214 to ABL1 on amplified episomes in T-cell acute lymphoblastic leukemia. Nat Genet. 2004 October; 36(10): 1084-9
[0462] Gruszka-Westwood A M, Horsley S W, Martinez-Ramirez A, Harrison C J, Kempski H, Moorman A V, Ross F M, Griffiths M, Greaves M F and L Kearney. Comparative expressed sequence hybridization studies of high-hyperdiploid childhood acute lymphoblastic leukemia. Genes Chromosomes Cancer. 2004 November; 41(3): 191-202
[0463] Holleman A, Cheok M H, den Boer M L, Yang W, Veerman A Y, Kazemier K M, Pei D, Cheng C, Pui C H, Relling M V, Janka-Schaub G E, Pieters R and W E Evans. Gene-expression patterns in drug-resistant acute lymphoblastic leukemia cells and response to treatment. N Engl J Med. 2004 Aug. 5; 351(6): 533-542
[0464] Jelinek D F, Tschumper R C, Stolovitzky G A, Iturria S J, Tu Y, Lepre J, Shah N and N E Kay. Identification of a global gene expression signature of B-chronic lymphocytic leukemia. Mol Cancer Res. 2003 March; 1(5): 346-361
[0465] Kawagoe H, Potter M, Ellis J and G C Grosveld. TEL2, an ETS factor expressed in human leukemia, regulates monocytic differentiation of U937 Cells and blocks the inhibitory effect of TELL on ras-induced cellular transformation. Cancer Res. 2004 Sep. 1; 64(17): 6091-6100
[0466] Leupin N, Luthi A, Novak U, Grob T J, Hugli B, Graber H, Fey M F and A Tobler. P73 status in B-cell chronic lymphocytic leukaemia. Leuk Lymphoma 2004 June; 45(6): 1205-1207
[0467] Lin J T, Wu M S, Wang W S, Yen C C, Chiou T J, Liu J H, Yang M H, Chao T C, Chou S C and P M Chen. All-trans retinoid acid increases Notch1 transcript expression in acute promyelocytic leukemia. Adv Ther. 2003 November-December; 20(6): 337-43
[0468] Lu D, Zhao Y, Tawatao R, Cottam H B, Sen M, Leoni L M, Kipps T J, Corr M and D A Carson. Activation of the Wnt signaling pathway in chronic lymphocytic leukemia. Proc Natl Acad Sci USA. 2004 Mar. 2; 101(9): 3118
[0469] Mackey J R, Galmarini C M, Graham K A, Joy A A, Delmer A, Dabbaugh L, Glubrecht D, Jewell L D, Lai R, Lang T, Young J D, Merle-Beral H, Binet J L, Cass C E and C Dumontet. Quantitative analysis of nucleoside transporter and metabolism gene expression in chronic lymphocytic leukemia (CLL)-identification of fludarabine-sensitive and insensitive populations. Blood. 2004 Sep. 28; [Epub ahead of print]
[0470] Mauvieux L, Leymarie V, Helias C, Perrusson N, Falkenrodt A, Lioure B, Lutz P and M Lessard. High incidence of Hox11L2 expression in children with T-ALL. Leukemia. 2002 December; 16(12): 2417-2422
[0471] Mayr C, Bund D, Schlee M, Moosmann A, Kofler D M, Hallek M and C M Wendtner. Fibromodulin as a novel tumor-associated antigen (TAA) in chronic lymphocytic leukemia (CLL) which allows expansion of specific CD8+ autologous T lymphocytes.
[0472] Müller-Tidow C, Metzelder S K, Buerger H, Packeisen J, Ganser A, Heil G, Kügler K, Adigüzel G, Schwäble J, Steffen B, Ludwig W D, Heinecke A, Büchner T, Berdel W E and H Serve. Expression of the p14^{ARF} tumor suppressor predicts survival in acute myeloid leukemia. Leukemia 2004 April; 18(4): 720-726
[0473] Nagy B, Ferrer A, Larramendy M L, Galimberti S, Aalto Y, Casas S, Vilpo J, Ruutu T, Vettenranta K, Franssila K and S Knuutila. Lymphotoxin beta expression is high in chronic lymphocytic leukemia but low in small lymphocytic lymphoma: a quantitative real-time reverse transcriptase polymerase chain reaction analysis. Haematologica. 2003 June; 88(6): 654-658
[0474] Nowicki M O, Pawlowski P, Fischer T, Hess G, Pawlowski T and T Skorski. Chronic myelogenous leukemia molecular signature. Oncogene. 2003 Jun. 19; 22(25): 3952-3963
[0475] Pui, C, Relling M V and J R Downing. Mechanisms of Disease: Acute Lymphoblastic Leukemia. 2004 Apr. 8; 350(15): 1535-1548
[0476] Rizzo M G, Giombini E, Diverio D, Vignetti M, Sacchi A, Testa U, Lo-Coco F and G Blandino. Analysis of p73 expression pattern in acute myeloid leukemias: lack of DeltaN-p73 expression is a frequent feature of acute promyelocytic leukemia. Leukemia. 2004 November; 18(11):1804-1809
[0477] Safley A M, Sebastian S, Collins T S, Tirado C A, Stenzel T T, Gong J Z and B K Goodman. Molecular and cytogenetic characterization of a novel translocation t(4;22) involving the breakpoint cluster region and platelet-derived growth factor receptor-alpha genes in a patient with atypical chronic myeloid leukemia. Genes Chromosomes Cancer 2004 May; 40(1): 44-50
[0478] Sarsotti E, Marugan I, Benet I, Terol M J, Sanchez-Izquierdo D, Tormo M, Rubio-Moscardo F, Martinez-Climent J A and J García-Conde. Bcl-6 mutation status provides clinically valuable information in early-stage B-cell chronic lymphocytic leukemia. Leukemia 2004 April; 18(4): 743-746
[0479] Sauerbrey A, Sell W, Steinbach D, Voigt A and F Zintl. Expression of the BCRP gene (ABCG2/MXR/ABCP) in childhood acute lymphoblastic leukaemia. Br J Haematol. 2002 July; 118(1): 147-150
[0480] Serinsoz E, Neusch M, Busche G, Wasielewski R, Kreipe H and O Bock. Aberrant expression of beta-catenin discriminates acute myeloid leukaemia from acute lymphoblastic leukaemia. Br J Haematol. 2004 August; 126(3): 313-319
[0481] Sun Y, Dong L J, Tian F, Wang S Q, Jia Z L, Huang J, Chen Z J, Li W J, Chen X L and P Zhu. Identification of Acute Leukemia-Specific Genes from Leukemia Recipient/Sibling Donor Pairs by Distinguishing Study with Oligonucleotide Microarrays. Zhongguo Shi Yan Xue Ye Xue Za Zhi 2004 August; 12(4): 450-454
[0482] Tallman M S, Lefebvre P, Baine R M, Shoji M, Cohen I, Green D, Kwaan H C, Paietta E and F R Rickles. Effects of all-trans retinoic acid or chemotherapy on the molecular regulation of systemic blood coagulation and fibrinolysis in patients with acute promyelocytic leukemia. J Thromb Haemost. 2004 August; 2(8): 1341-1350
[0483] Tsutsumi C, Ueda M, Miyazaki Y, Yamashita Y, Choi Y L, Ota J, Kaneda R, Koinuma K, Fujiwara S, Kisanuki H, Ishikawa M, Ozawa K, Tomonaga M and H Mano. DNA microarray analysis of dysplastic morphology associated with acute myeloid leukemia. Exp Hematol. 2004 September; 32(9): 828-835
[0484] van der Burg M, Poulsen T S, Hunger S P, Beverloo H B, Smit E M E, Vang-Nielsen K, Langerak A W and J J M van Dongen. Split-signal FISH for detection of chromosome aberrations in acute lymphoblastic leukemia. Leukemia 2004 May; 18(5): 895-908
[0485] Vialle-Castellano A, Gaugler B, Mohty M, Isnardon D, van Baren N and D Olive. Abundant expression of fibronectin is a major feature of leukemic dendritic cells differentiated from patients with acute myeloid leukemia. Leukemia. 2004 March; 18(3): 426-433
[0486] Vialle-Castellano A, Laduron S, De Plaen E, Jost E, Dupont S, Ameye G, Michaux L, Coulie P, Olive D, Boon T and N van Baren. A gene expressed exclusively in acute B lymphoblastic leukemias. Genomics 2004 January; 83(1): 85-94
[0487] von Bergh A R M, Wijers P M, Groot A J, van Zelderen-Bhola S, Falkenburg J H F, Kluin P M and E Schuuring. Identification of a novel RAS GTPase-activating protein (RASGAP) gene at 9q34 as an MLL fusion partner in a patient with de novo acute myeloid leukemia. Genes Chromosomes Cancer 2004 April; 39(4): 324-34
[0488] Yeoh E J, Ross M E, Shurtleff S A, Williams W K, Patel D, Mahfouz R, Behm F G, Raimondi S C, Relling M V, Patel A, Cheng C, Campana D, Wilkins D, Zhou X, Li J, Liu H, Pui C H, Evans W E, Naeve C, Wong L and J R Downing. Classification, subtype discovery, and prediction of outcome in pediatric acute lymphoblastic leukemia by gene expression profiling. Cancer Cell 2002 March; 1(2): 133-143
[0489] Zhu N, Gu L, Findley H W, Li F and M Zhou. An alternatively spliced survivin variant is positively regulated by p53 and sensitizes leukemia cells to chemotherapy. Oncogene 2004 Sep. 30; 23(45): 7545-7551

[0490] Points were awarded to genes of interest based on the number of independent researchers who found modulations within lymphoma and/or leukemia, as well as the number of different methods used. For example, four scientists found CD22 to be differentially expressed between subtypes using three different techniques (microarray analysis, FISH and PCR); therefore CD22 was assigned 4 points for independent research and 3 points for different methods for a total of 7 points. Another gene, CD3D, was shown to be differentially expressed by three researchers; however they all used microarray analysis as their method. Consequently, CD3D was assigned 3 points for independent research but only one for different methods, resulting in a total score of 4 points. The identified genes were ranked and the 1154 with the highest point values were selected for inclusion in one or more HCP sets. A list of these genes is shown in Table 1.

### Example 15

### Identification of Polynucleotide Probes for Detecting Expression Levels of Genes in HCP Sets

[0491] Nucleotide sequences suitable for the preparation of polynucleotide probes for detecting expression levels of genes in HCP sets were determined as described in Example 7. The nucleotide sequences of the polynucleotide probes selected in this manner are shown in Table 20.

### Example 16

### Preparation of an Hematological Cancer Profiling (HCP) Array

[0492] The HCP array was manufactured using CodeLink technology, by GE Healthcare (USA). Briefly, the probes are manufactured and then tethered onto the array glass slide containing CodeLink's proprietary 3-D aqueous gel. This tethering step was performed in a class 1000 clean room to avoid contamination of the array slide surface. Manufactured array slides were then subjected to quality control before usage.

[0493] The HCP array slide contained 1192 probes targeting human mRNA sequences and 62 control (30 positive control and 32 negative control) probes which target bacterial sequences that are not found in humans. These control target genes are shown in Tables 29 and 30.

### Example 17

### Preparation of Test Samples from Lymphoma and Leukemia Tissues for Profiling Using an HCP Array

[0494] Test samples from 23 human lymphoma tissues, 2 leukemia tissues, and 2 control tissues were prepared. Lymphoma samples were taken from lymph nodes, leukemia samples were prepared from blood samples, and control tissues consisted of human white blood cells. The 23 lymphoma samples consisted of 5 DLBCL, 4 FL, 4 HL, 4 MCL, 2 MZL, 2 SLL and 2 peripheral TCL samples as shown in Table 42. Both the leukemia RNA samples were from CLL patients, and the 2 cell lines used were Jurkat (T-ALL) and K-562 (AML), as shown in Table 43.

TABLE 42
Lymphoma samples

| Lymphoma | Location or Cell type |
|---|---|
| DLBCL-1 | Stomach |
| DLBCL-2 | Lymph node |
| DLBCL-3 | Spleen |
| DLBCL-4 | Spleen |
| DLBCL-5 | Groin |
| FL-1 | Lymph node |
| FL-3 | Small intestine |
| FL-4 | Lymph node |
| FL-5 | Lymph node |
| HL-1 | Lymph node |
| HL-2 | Lymph node |
| HL-3 | Lymph node |
| HL-4 | Lymph node |
| MCL-1 | Lymph node |
| MCL-2 | Ileum |
| MCL-3 | Lacrimal gland |
| MCL-4 | Spleen |
| MZL-2 | Lymph node |
| MZL-4 | Lymph node |
| SLL-1 | Lymph node |
| SLL-3 | Lymph node |
| TCL-1 | Lymph node |
| TCL-2 | Testis |

TABLE 43
Leukemia samples

| | Patient sample or |
|---|---|
| Leukemia | Cell line |
| CLL-1 | Patient sample |
| CLL-2 | Patient sample |
| AML | K-562 (Cell line) |
| T-ALL | Jurkat (Cell line) |

[0495] Total RNA samples from leukemia, and control tissues were prepared using the Paxgene Blood RNA kit (Qiagen), according to the protocol supplied with the kit. Briefly, total RNA was isolated form 2.5 mL of blood. First, blood RNA tubes were thawed and incubated at room temperature for 2 hours. Next, the tubes were spun for 10 minutes and the supernatant removed. 5 mL of RNase-free water was added, followed by vortexing to resuspend pellet. The RNA tube was again spun for 10 minutes and supernatant removed. Buffers BR1 (360 μL), BR2 (300 μL) and 40 μL Proteinase K were added to the sample, vortexed and incubated for 10 min in 55° C. shaker-incubator. After incubation, the sample was spun for 3 min and supernatant was transferred to a new 1.5 mL tube. 350 μL ethanol was added, and the solution was loaded onto PAXgene column. Column was centrifuged for 1 minute and flow-through discarded. Buffers (700 μL BR3 and 2×500 μL BR4, respectively) were added to the column, spun and flow-through discarded each time. Column was transferred to new 1.5 mL tube, 40 μL Buffer BR5 added and column was spun for 1 minute. Another 40 μL Buffer BR5 was added to column and spun for 1 min. Eluate was incubated for 5 min at 65° C., chilled on ice and stored at −70° C.

[0496] Lymphoma samples were prepared from lymph node samples using the Qiagen RNeasy kit according to the protocol supplied with the kit.

[0497] Poly-A mRNA was isolated from the cell lines using the Ambion Poly(A)Purist Kit for mRNA isolation, according to the protocol supplied with the kit. Sample RNA quality was assessed using an Agilent 2100 Bioanalyzer.

[0498] Sample RNA quality from all samples was assessed using an Agilent 2100 Bioanalyzer.

[0499] Biotin-labeled cRNA was prepared from the RNA samples as follows. cRNA synthesis was performed essentially as described by Shippy et al. BMC Genomics. 2004 Sep. 2; 5(1):61. Briefly, cRNA was prepared by in vitro transcription using a single, labeled nucleotide, biotin-11-UTP in the IVT reaction at a concentration of 1.25 mM. Unlabeled UTP was present at 3.75 mM, while GTP, ATP, and CTP were at 5 mM. The mixture was incubated at 37° C. overnight for 14 hours. The labeled cRNA was then purified using an RNeasy® mini kit (Qiagen) according to the manufacturer's protocol. The concentration and quality of the cRNA were confirmed using an Agilent 2100 Bioanalyzer.

### Example 18

### Hybridization of Test Samples to HCP Array and Detection of Hybridization

[0500] Each sample was run in duplicate (and in some cases triplicate) on the HCP array. The replicates were compared to ensure the consistency of the array. Sample replicates were hybridized with the HCP array described in Example 16, using a method similar to that described by Davidson et al. Cancer Res. 2004 Sep. 15; 64(18):6797-6804. Briefly, the purified cRNA was fragmented in 5× fragmentation buffer at 94° C. for 20 minutes. 6 μg of fragmented cRNA in 60 μl of hybridization solution was added to each array chamber and incubated for 18 hours at 37° C., while shaking at 225 r.p.m. After hybridization, the arrays were washed in 0.75×TNT (0.1M Tris-Hcl, pH 7.6, 0.15M NaCl, 0.05% Tween 20) buffer at 46° C. for 1 hour followed by incubation with Cy5™-streptavidin at room temperature for 30 minutes in the dark. Arrays were then washed in 1×TNT four times for 5 minutes each followed by a rinse in 0.05% Tween 20/SSC buffer. The arrays were then dried by centrifugation, chamber units were removed and slides were kept in the dark until scanning.

[0501] Slides were scanned using the GenePix 4000B (Axon Instruments) and image analysis was carried out with the CodeLink Expression v4 software (Amersham Biosciences).

### Example 19

### Analysis of Data Generated from Hybridization of Lymphoma Test Samples to HCP Array

[0502] The gene expression profiles resulting from the hybridization of lymphoma test sample cRNA with the HCP array were analyzed using microarray analysis software to identify differentially expressed genes and establish distinct genetic profiles for lymphoma subtypes. Clustering algorithms were also employed.

[0503] Lymphoma and leukemia experiments were performed at different times and, therefore, were analyzed separately. The data analysis methods varied for the two data sets due to the differing sample sizes and subtype representation of the lymphoma and leukemia studies. The analysis of data generated from leukemia samples is described in Example 20.

[0504] Before performing analyses, expression values were normalized using the quantile normalization method so that the gene expression between samples could be compared. Technical replicates were merged by taking the average of expression values.

### Lymphoma Data Analysis

[0505] To determine the unique gene signatures for each subtype, two methods were used to generate two independent lists. Both methods used the entire discovery gene list as shown in Table 1 as a starting point and imposed a two-fold differential expression limit; however, one list was compiled manually by evaluating differences in fold change relative to the control, while the other list was generated using statistical analyses to determine genes that were significantly differentially expressed between the subtypes. For each subtype, the two lists were compared and overlapped to produce a subtype-specific gene signature.

[0506] Genes that were common to all subtypes of lymphoma, either always overexpressed or always underexpressed vs. control, were removed from subtype signatures. These genes are listed in Table 31, and may be of interest when comparing subtypes to each other, however they do not aid in distinguishing subtypes in relation to the control.

[0507] The size of the gene signatures ranged from 33 genes for HL, to 159 genes for MZL (See Tables 32-38). Because they were based on fewer samples, the signatures for MZL, SLL and TCL are larger, yet less reliable than the other subtypes. The total number of genes that make up the seven lymphoma subtype-specific signatures was determined to be 296. These genes are shown in Table 2:

[0508] Signature genes for each lymphoma subtype are listed in Tables 32-38 and shown as hierarchical clustering images in FIGS. 1-7.

[0509] The 296 genes found to be differentially expressed between subtypes, relative to the control, were clustered using hierarchical clustering with average linkage using the Euclidian distance metrics, shown in FIG. 8. Differential gene expression is seen between lymphoma and controls as well as between the various lymphoma subtypes.

### Results

[0510] The HCP array was able to detect genes in the lymphoma and control samples. Correlation coefficient and other statistical analyses revealed that sample replicates were highly similar to one another, demonstrating the consistency of the HCP array. Statistical analyses also revealed a high dissimilarity between the lymphoma and leukemia subtypes (see Example 20) and controls, indicating that the HCP array is able to detect differential expression profiles (see FIGS. 8 and 9). As well as distinguishing between “diseased” and “healthy” samples, the HCP array identified distinct gene expression profiles that were produced by the different lymphoma and subtypes. These profiles, seen in FIGS. 1-8, provide information useful for accurate diagnosis and risk assessment.

[0511] The HCP array identified unique gene expression profiles, referred to as signatures, for each of the lymphoma subtypes tested. The following genetic signatures distinguished specific subtypes, and are listed in relation to the expression level in control samples.

### Diffuse Large B-Cell Lymphoma

[0512] Diffuse Large B-Cell Lymphoma (DLBCL) is the most common subtype of non-Hodgkin's lymphoma, accounting for 40% of annual NHL cases. DLBCL is an aggressive malignancy, with less than half of patients achieving remission. DLCBL signature genes are shown in Table 32

### Follicular Lymphoma

[0513] Follicular lymphoma (FL) is an indolent or slow growing cancer that accounts for about 25% of all non-Hodgkin's lymphomas. Due to the slow onset of FL, many patients exhibit wide-spread disease by the time they are diagnosed. Another complication of FL is that it undergoes a transformation into a more aggressive form of DLBCL in 25-60% of patients. FL signature genes are shown in Table 33.

### Hodgkin's Lymphoma

[0514] Hodgkin's Lymphoma (HL) has a fairly good prognosis, with a 20 percent mortality rate. HL is characterized by the presence of a particular type of cell morphology, known as Reed-Sternberg Cells. While HL is easier to distinguish than many subtypes, its similarity to T-Cell lymphomas, such as ALCL, still proves an obstacle to diagnosis. HL signature genes are shown in Table 34.

### Mantle Cell Lymphoma

[0515] Mantle Cell Lymphoma (MCL) accounts for only 6% of NHL's but claims for a disproportionately larger number of lives because it is an aggressive, incurable disease. Due to delayed diagnosis, many patients already have bone marrow involvement by the time MCL is identified. Some patients succumb to MCL in under a year while others survive for longer; the median survival for MCL is 3 years. MCL signature genes are shown in Table 35.

### Marginal Zone B-Cell Lymphoma

[0516] Marginal Zone B-Cell Lymphoma (MZL) is similar to MCL in appearance but progresses much more slowly. MZL can be difficult to detect, because, unlike many other lymphomas, it is not uncommon for marginal zone tumors to occur “extranodally” in areas outside the lymph nodes, such as the stomach, thyroid or bladder. MZL signature genes are shown in Table 36.

### Small Lymphocytic Lymphoma

[0517] Small Lymphocytic Lymphoma (SLL) is closely related to B-Cell Chronic Lymphocytic Leukemia (B-CLL) and tends to follow a less severe disease course than many lymphomas. However, in approximately 15% of cases, SLL transforms into aggressive DLCBL. Recent research has shown the potential of gene expression profiling to help predict these deadly transformations. SLL signature genes are shown in Table 37.

### T-Cell Lymphoma

[0518] T-Cell Lymphomas (TCL) account for only 15% of NHL, but tend to have a poor prognosis. TCL often strikes immuno-compromised individuals and is resistant to therapy. TCL signature genes are shown in Table 38.

[0519] The results of this study indicated that the above gene signatures can be used to distinguish between lymphoma subtypes thereby facilitating accurate diagnosis and timely treatment for patients.

[0520] The generated lymphoma subtype gene signatures were tested by using each signature as a reference and comparing it to the gene expression for all 23 lymphoma samples. For each sample, points were assigned for every gene that matched the reference signature, then totaled and expressed as a percentage of the total number of genes for that signature. The results of this test confirmed that the signatures were effective in classifying lymphoma subtypes. For example, the four FL samples matched the expression of the 70 genes in the FL signature for an average of 97.5%. The next closest sample, DLBCL-5, registered an 88.5% match, with most other samples showing much lower correlations. The results of this testing procedure are shown in Table 44 below.

[0521] An example of partial raw test data for HL signature genes in shown below in Table 45. Some columns were removed in order to fit onto page; this table is meant to explain how percentage scores were reached, rather than show complete data. Score columns were added for each sample, and the total score was divided by the number of genes in the signature (33 in the case of HL) to arrive at a percentage match value.

Summary of test results for subtype signatures (percentage match values for all signatures and samples)

| | | Samples | | | | | | | | | | | | |
|---|---|---|---|---|---|---|---|---|---|---|---|---|---|---|
| | | DLBCL-1 | DLBCL-2 | DLBCL-3 | DLBCL-4 | DLBCL-5 | FL-1 | FL-3 | FL-4 | FL-5 | HL-1 | HL-2 | HL-3 | HL-4 |
| Signatures | DLBCL | 98.04 | 90.20 | 98.04 | 92.16 | 94.12 | 72.55 | 54.90 | 50.98 | 52.94 | 50.98 | 50.98 | 50.98 | 33.33 |
| | FL | 68.57 | 54.29 | 61.43 | 41.43 | 88.57 | 94.29 | 98.57 | 98.57 | 98.57 | 41.43 | 62.86 | 42.86 | 55.71 |
| | HL | 42.42 | 69.70 | 72.73 | 75.76 | 78.79 | 69.70 | 72.73 | 69.70 | 66.67 | 100.00 | 100.00 | 100.00 | 90.91 |
| | MCL | 51.25 | 36.25 | 53.75 | 33.75 | 60.00 | 56.25 | 58.75 | 66.25 | 50.00 | 25.00 | 38.75 | 22.50 | 55.00 |
| | MZL | 71.07 | 63.52 | 69.81 | 32.70 | 64.15 | 77.36 | 46.54 | 62.26 | 49.69 | 51.57 | 41.51 | 46.54 | 37.74 |
| | SLL | 64.06 | 53.91 | 59.38 | 31.25 | 66.41 | 68.75 | 49.22 | 65.63 | 50.00 | 40.63 | 39.06 | 38.28 | 39.06 |
| | TCL | 60.87 | 71.74 | 70.65 | 44.57 | 52.17 | 58.70 | 27.17 | 35.87 | 38.04 | 68.48 | 38.04 | 69.57 | 16.30 |

Samples

| | | MCL-1 | MCL-2 | MCL-3 | MCL-4 | MZL-2 | MZL-4 | SLL-1 | SLL-3 | TCL-1 | TCL-2 |
|---|---|---|---|---|---|---|---|---|---|---|---|
| Signatures | DLBCL | 58.82 | 62.75 | 54.90 | 31.37 | 58.82 | 58.82 | 50.98 | 52.94 | 60.78 | 54.90 |
| | FL | 67.14 | 71.43 | 68.57 | 47.14 | 75.71 | 78.57 | 61.43 | 71.43 | 45.71 | 38.57 |
| | HL | 54.55 | 63.64 | 48.48 | 51.52 | 57.58 | 66.67 | 54.55 | 45.45 | 72.73 | 57.58 |
| | MCL | 91.25 | 97.50 | 97.50 | 92.50 | 76.25 | 78.75 | 81.25 | 78.75 | 21.25 | 37.50 |
| | MZL | 84.28 | 74.84 | 63.52 | 40.88 | 100.00 | 100.00 | 78.62 | 73.58 | 57.23 | 39.62 |
| | SLL | 84.38 | 76.56 | 74.22 | 48.44 | 82.03 | 86.72 | 100.00 | 98.44 | 47.66 | 43.75 |
| | TCL | 53.26 | 50.00 | 39.13 | 17.39 | 51.09 | 51.09 | 42.39 | 47.83 | 100.00 | 98.91 |

TABLE 45
Raw test data for HL signature genes

| Reference | | | | | | | | | | | | | | | | | |
|---|---|---|---|---|---|---|---|---|---|---|---|---|---|---|---|---|---|
| HL | | DLBCL-1 | | DLBCL-2 | | FL-4 | | FL-5 | | HL-1 | | HL-2 | | HL-3 | | HL-4 | |
| Genes | vsZ | vsZ | Score | vsZ | Score | vsZ | Score | vsZ | Score | vsZ | Score | vsZ | Score | vsZ | Score | vsZ | Score |
| CCL19 | up | up | 1 | up | 1 | up | 1 | up | 1 | up | 1 | up | 1 | up | 1 | up | 1 |
| CYP27B1 | up | up | 1 | up | 1 | null | 0 | up | 1 | up | 1 | up | 1 | up | 1 | up | 1 |
| PISD | down | null | 0 | null | 0 | null | 0 | null | 0 | down | 1 | down | 1 | down | 1 | null | 0 |
| DHCR24 | up | up | 1 | up | 1 | up | 1 | null | 0 | up | 1 | up | 1 | up | 1 | up | 1 |
| LGMN | up | null | 0 | null | 0 | up | 1 | up | 1 | up | 1 | up | 1 | up | 1 | up | 1 |
| TGFBR3 | down | down | 1 | down | 1 | down | 1 | down | 1 | down | 1 | down | 1 | down | 1 | down | 1 |
| EBI2 | down | down | 1 | down | 1 | null | 0 | null | 0 | down | 1 | down | 1 | down | 1 | null | 0 |
| TFF3 | up | null | 0 | up | 1 | up | 1 | null | 0 | up | 1 | up | 1 | up | 1 | up | 1 |
| MMP12 | up | up | 1 | up | 1 | null | 0 | null | 0 | up | 1 | up | 1 | up | 1 | up | 1 |
| LYN | down | down | 1 | down | 1 | down | 1 | down | 1 | down | 1 | down | 1 | down | 1 | null | 0 |
| IL1R1 | up | null | 0 | up | 1 | up | 1 | up | 1 | up | 1 | up | 1 | up | 1 | up | 1 |
| CD81 | up | null | 0 | null | 0 | up | 1 | up | 1 | up | 1 | up | 1 | up | 1 | up | 1 |
| APOC2 | up | null | 0 | up | 1 | null | 0 | up | 1 | up | 1 | up | 1 | up | 1 | up | 1 |
| TRAF1 | up | up | 1 | up | 1 | up | 1 | up | 1 | up | 1 | up | 1 | up | 1 | up | 1 |
| SLAMF1 | up | down | 0 | up | 1 | up | 1 | up | 1 | up | 1 | up | 1 | up | 1 | up | 1 |
| CDKN2D | down | null | 0 | down | 1 | down | 1 | down | 1 | down | 1 | down | 1 | down | 1 | down | 1 |
| PRAME | up | up | 1 | null | 0 | null | 0 | null | 0 | up | 1 | up | 1 | up | 1 | up | 1 |
| SORL1 | down | null | 0 | down | 1 | null | 0 | null | 0 | down | 1 | down | 1 | down | 1 | down | 1 |
| CSTA | down | down | 1 | null | 0 | down | 1 | null | 0 | down | 1 | down | 1 | down | 1 | down | 1 |
| HSPA6 | down | null | 0 | down | 1 | down | 1 | down | 1 | down | 1 | down | 1 | down | 1 | down | 1 |
| GSTT1 | up | null | 0 | up | 1 | up | 1 | null | 0 | up | 1 | up | 1 | up | 1 | up | 1 |
| PIK3C2B | up | up | 1 | null | 0 | up | 1 | up | 1 | up | 1 | up | 1 | up | 1 | up | 1 |
| KIAA0992 | up | null | 0 | null | 0 | null | 0 | null | 0 | up | 1 | up | 1 | up | 1 | up | 1 |
| GNG11 | down | down | 1 | down | 1 | null | 0 | down | 1 | down | 1 | down | 1 | down | 1 | down | 1 |
| 13CDNA73 | down | down | 1 | down | 1 | down | 1 | down | 1 | down | 1 | down | 1 | down | 1 | down | 1 |
| CTLA4 | up | null | 0 | up | 1 | up | 1 | up | 1 | up | 1 | up | 1 | up | 1 | up | 1 |
| MRPL33 | down | down | 1 | down | 1 | down | 1 | down | 1 | down | 1 | down | 1 | down | 1 | down | 1 |
| STAT1 | up | down | 0 | null | 0 | null | 0 | up | 1 | up | 1 | up | 1 | up | 1 | up | 1 |
| FLJ40504 | up | down | 0 | up | 1 | up | 1 | null | 0 | up | 1 | up | 1 | up | 1 | up | 1 |
| AKR1C1 | up | null | 0 | null | 0 | up | 1 | up | 1 | up | 1 | up | 1 | up | 1 | up | 1 |
| KLRK1 | down | null | 0 | down | 1 | down | 1 | down | 1 | down | 1 | down | 1 | down | 1 | down | 1 |
| NFKBIA | up | null | 0 | null | 0 | up | 1 | up | 1 | up | 1 | up | 1 | up | 1 | up | 1 |
| STS-1 | down | null | 0 | down | 1 | down | 1 | down | 1 | down | 1 | down | 1 | down | 1 | down | 1 |
| | | | 42.4 | | 69.7 | | 69.7 | | 66.7 | | 100 | | 100 | | 100 | | 90.9 |

[0522] Numerous genes on the HCP array found to be differentially expressed in certain subtypes are consistent with recent publications. For example, Rosenwald et al. showed that both BANK1 and SPAP1 were overexpressed in MCL, in agreement with the hematological cancer profiling signatures as shown in Table 35. As well, several of the DLBCL signature genes identified using the HCP array, namely the overexpression of NME1, MCM7 and BIK, have been confirmed by multiple sources.

### Example 20

### Analysis of Data Generated from Hybridization of Leukemia Test Samples to HCP Array

[0523] The gene expression profiles resulting from the hybridization of test sample cRNA with the HCP array were analyzed using microarray analysis software to identify differentially expressed genes and establish distinct genetic profiles for lymphoma subtypes. Clustering algorithms were also employed.

[0524] Lymphoma and leukemia experiments were performed at different times and, therefore, were analyzed separately. The data analysis methods varied for the two data sets due to the differing sample sizes and subtype representation of the lymphoma and leukemia studies.

[0525] Before performing analyses, expression values were normalized using the quantile normalization method so that the gene expression between samples could be compared. Technical replicates were merged by taking the average of expression values.

### Leukemia Data Analysis

[0526] SAM analysis was performed to identify genes with significant differential expression. From the resulting set of genes, a one-way ANOVA, with Stepdown Westfall-Young adjustment to p-values, was used to select genes with p<0.01. These analyses yielded a list of 157 genes that were differentially expressed between leukemia subtypes.

[0527] The 157 genes found to be differentially expressed were clustered using hierarchical clustering with average linkage using the Euclidian distance metrics, shown in FIG. 9. A list of these genes is found in Table 3 above. Differential gene expression is seen between leukemia and controls as well as between the various leukemia subtypes.

[0528] To determine the unique gene signatures for each leukemia subtype, a 5 fold filter was imposed on the 157 significant genes. Only genes that showed a fold change of greater than 5 or less than −5 in a subtype were considered to be “signature” genes. Gene lists for CLL, AML and T-ALL were each filtered to meet these criteria, thereby producing subtype-specific gene signatures. Signature genes for individual leukemia subtypes are listed in Tables 39-41 and shown as hierarchical clustering images in FIGS. 10-12.

### Results

[0529] The HCP array was able to detect genes in the leukemia and control samples. Correlation coefficient and other statistical analyses revealed that sample replicates were highly similar to one another, demonstrating the consistency of the HCP array. Statistical analyses also revealed a high dissimilarity between the lymphoma and leukemia subtypes and controls, indicating that the HCP array is able to detect differential expression profiles (see FIG. 9). As well as distinguishing between “diseased” and “healthy” samples, the HCP array identified distinct gene expression profiles that were produced by the different leukemia subtypes. These profiles, seen in FIGS. 9-12, provide information useful for accurate diagnosis and risk assessment.

[0530] The HCP array identified unique gene expression profiles, referred to as signatures, for each of the leukemia subtypes tested. The following genetic signatures distinguished specific leukemia subtypes, and are listed in relation to the expression level in control samples.

### Chronic Lymphocytic Leukemia

[0531] Chronic Lymphocytic Leukemia (CLL) is the most common adult leukemia. CLL is a cancer of the B- or T-lymphocytes; B-CLL is the prevalent form of CLL, T-lymphocyte abnormalities, while more severe, account for less than 5% of CLL cases. CLL can be difficult to diagnose, due to its slow onset and vague symptoms. The Flu-like nature of some of the common CLL symptoms, such as fever and fatigue, are often a cause of delayed or misdiagnosis.

[0532] CLL has become a topic of particular interest to physicians due to its inconsistent response to treatment. Many CLL patients respond well to chemotherapy and/or radiation, while others show virtually no improvement. Recent research by Mackey et al. Blood 2005 Jan. 15; 105(2): 767-774, and Vallat et al. Blood 2003 Jun. 1; 101(11): 4598-4606, has suggested the existence of distinct CLL subtypes that are resistant to chemotherapy and radiation treatment, respectively. Identification of new CLL subtypes is the next step in understanding and improving the prognosis of CLL. CLL signature genes are shown in Table 39.

### Acute Myelogenous Leukemia

[0533] Acute Myelogenous Leukemia (AML) patients worsen quickly, making fast and accurate diagnosis a must. Unfortunately, AML can easily be misdiagnosed using common (aforementioned) methods. Most AML patients respond well to initial treatment, however, AML has a high rate of relapse. Improved understanding of gene expression within AML will lead to efficient diagnostic tools as well as outcome prediction. AML signature genes are shown in Table 40.

### Acute T-Cell Lymphocytic Leukemia

[0534] Acute T-Cell Lymphocytic Leukemia (T-ALL) is the most common leukemia among children and adolescents. Less understood than its B-Cell counterpart, T-ALL proves difficult to classify. T-ALL does not display distinct subtypes, making risk assessment challenging. However, a recent study by Chiaretti et al. Blood 2004 Apr. 1; 103(7): 2771-2778, showed that gene expression profiles can provide insight into prognosis of T-ALL, with certain genes indicating a favorable outcome and others a high risk of relapse. T-ALL signature genes are shown in Table 41.

[0535] The results of this study indicate that the above gene signatures can be used to distinguish between leukemia subtypes thereby facilitating accurate diagnosis and timely treatment for patients.

[0536] The disclosure of all patents, publications, including published patent applications, and database entries referenced in this specification are specifically incorporated by reference in their entirety to the same extent as if each such individual patent, publication, and database entry were specifically and individually indicated to be incorporated by reference.

[0537] Although the invention has been described with reference to certain specific embodiments, various modifications thereof will be apparent to those skilled in the art without departing from the spirit and scope of the invention as outlined in the claims appended hereto.

The application's sequence listing, which the Patent Office published only in electronic form, follows.

SEQUENCE LISTING (4530 sequences)

SEQ ID NO: 1 - DNA, 30 bp, Homo Sapien
tcgagacgcagacttcaatggaaccaaggc

SEQ ID NO: 2 - DNA, 30 bp, Homo Sapien
caaagttttatcaagtttgggtctgtgctg

SEQ ID NO: 3 - DNA, 30 bp, Homo Sapien
acctgttaaagggccaacagaactcttggt

SEQ ID NO: 4 - DNA, 30 bp, Homo Sapien
tggtgttaccagtgtacgcgcagtgacctt

SEQ ID NO: 5 - DNA, 30 bp, Homo Sapien
ttcagaaaccctgtagcgtgtaataaaaga

SEQ ID NO: 6 - DNA, 30 bp, Homo Sapien
ctacttgcttccttttagcttctgccttgc

SEQ ID NO: 7 - DNA, 30 bp, Homo Sapien
catggcatgaaataagtcaggttctttaca

SEQ ID NO: 8 - DNA, 30 bp, Homo Sapien
gaaacccacaaaatcagaaacacagtacaa

SEQ ID NO: 9 - DNA, 30 bp, Homo Sapien
agatggcgagaacctaagtttcagttgatt

SEQ ID NO: 10 - DNA, 30 bp, Homo Sapien
gtttgtatccaactccgggcaatgtggggc

SEQ ID NO: 11 - DNA, 30 bp, Homo Sapien
atgaccctaataggtctgtttagtaacagt

SEQ ID NO: 12 - DNA, 30 bp, Homo Sapien
ccacctgaattgagcatttaggaatttatg

SEQ ID NO: 13 - DNA, 30 bp, Homo Sapien
tgctatacactgggatgtctaattgcagca

SEQ ID NO: 14 - DNA, 30 bp, Homo Sapien
gggctacaatccattgttcttagtccaata

SEQ ID NO: 15 - DNA, 30 bp, Homo Sapien
catttatatcatcctcaaccctaaatggac

SEQ ID NO: 16 - DNA, 30 bp, Homo Sapien
aagaaatgcctataaagacagacttgagtg

SEQ ID NO: 17 - DNA, 30 bp, Homo Sapien
gtacgaggagcatacgccacacttatgatt

SEQ ID NO: 18 - DNA, 30 bp, Homo Sapien
aacttctgactacttgttgtatctgctgga

SEQ ID NO: 19 - DNA, 30 bp, Homo Sapien
tgttgcacttggttagctttaattgttctg

SEQ ID NO: 20 - DNA, 30 bp, Homo Sapien
gaacctcccagtgaaagggcagccttcatt

SEQ ID NO: 21 - DNA, 30 bp, Homo Sapien
tagacagagtacaaggtgtaattcagacag

SEQ ID NO: 22 - DNA, 30 bp, Homo Sapien
atatgtataaaaacagtagtttgggggcct

SEQ ID NO: 23 - DNA, 30 bp, Homo Sapien
gtgtcggtgccaaaattggagggagattta

SEQ ID NO: 24 - DNA, 30 bp, Homo Sapien
agatcagagggtgactgatgatacatgcat

SEQ ID NO: 25 - DNA, 30 bp, Homo Sapien
tactaactgctctcagagaaagtagctttg

SEQ ID NO: 26 - DNA, 30 bp, Homo Sapien
gtgggggtggaccgaatttggcaagaatga

SEQ ID NO: 27 - DNA, 30 bp, Homo Sapien
acactcgtgttcatgttggtgcgatcgggg

SEQ ID NO: 28 - DNA, 30 bp, Homo Sapien
aacaaggggttactttacatcctactaaga

SEQ ID NO: 29 - DNA, 30 bp, Homo Sapien
cggggtgtgatgaatagcgaatcatctcaa

SEQ ID NO: 30 - DNA, 30 bp, Homo Sapien
caagaaagaaacgtacttaactgtgtgaag

SEQ ID NO: 31 - DNA, 30 bp, Homo Sapien
cccgtcttaccgctagttccctgcatagca

SEQ ID NO: 32 - DNA, 30 bp, Homo Sapien
aaagaaagcatctcgtaggtgtgtctactg

SEQ ID NO: 33 - DNA, 30 bp, Homo Sapien
cccaaactaatctaggaatcactgtctaac

SEQ ID NO: 34 - DNA, 30 bp, Homo Sapien
cattcatagccagatgtgtatcagatgttt

SEQ ID NO: 35 - DNA, 30 bp, Homo Sapien
caactaagttatgaaagtagagagatctgc

SEQ ID NO: 36 - DNA, 30 bp, Homo Sapien
actatagaatcccatacacaacggaatcac

SEQ ID NO: 37 - DNA, 30 bp, Homo Sapien
tatccttttctggagagtagtctagaccaa

SEQ ID NO: 38 - DNA, 30 bp, Homo Sapien
cgaagcgtacggagcagtaagacacataag

SEQ ID NO: 39 - DNA, 30 bp, Homo Sapien
attcgctcccacattctgatgagcaaccgc

SEQ ID NO: 40 - DNA, 30 bp, Homo Sapien
gagagtgcaacagtagcataggaccctacc

SEQ ID NO: 41 - DNA, 30 bp, Homo Sapien
cagccaaaactccacagtcaatattagtaa

SEQ ID NO: 42 - DNA, 30 bp, Homo Sapien
ggctctcattgacttccttactaagcatag

SEQ ID NO: 43 - DNA, 30 bp, Homo Sapien
cagtacacccgcccgttcttactgctaaaa

SEQ ID NO: 44 - DNA, 30 bp, Homo Sapien
cgtggaataaacggtgtgtcctgagaaacc

SEQ ID NO: 45 - DNA, 30 bp, Homo Sapien
gatgatccccaatatatctaccattgtatg

SEQ ID NO: 46 - DNA, 30 bp, Homo Sapien
caccattagctataatggcactttgtttgt

SEQ ID NO: 47 - DNA, 30 bp, Homo Sapien
gtttccttttatgagacccattcctatttc

SEQ ID NO: 48 - DNA, 30 bp, Homo Sapien
agagagagtagcgtgcggactagcaacgca

SEQ ID NO: 49 - DNA, 30 bp, Homo Sapien
tctgccctagcctggtttacggtttcttat

SEQ ID NO: 50 - DNA, 30 bp, Homo Sapien
gtggaattaaaggaatccctagaataagga

SEQ ID NO: 51 - DNA, 30 bp, Homo Sapien
gtggtgcactcctataaaaattgaagctgc

SEQ ID NO: 52 - DNA, 30 bp, Homo Sapien
agcatgcatcacggatcaatagactgtact

SEQ ID NO: 53 - DNA, 30 bp, Homo Sapien
tacgttgtcagaattggaatgacaaacagg

SEQ ID NO: 54 - DNA, 30 bp, Homo Sapien
actttcatgtgactggagtcatcttgtcca

SEQ ID NO: 55 - DNA, 30 bp, Homo Sapien
cagcaatgagctattagattcattttggga

SEQ ID NO: 56 - DNA, 30 bp, Homo Sapien
atctttggtgaccctctcggttctgcttct

SEQ ID NO: 57 - DNA, 30 bp, Homo Sapien
tttcttacgtacactgtacttctgtgtgca

SEQ ID NO: 58 - DNA, 30 bp, Homo Sapien
cctggatgttaaacagatcaatctcactcc

SEQ ID NO: 59 - DNA, 30 bp, Homo Sapien
tctcttatttctccccctagtttgtgagaa

SEQ ID NO: 60 - DNA, 30 bp, Homo Sapien
ctgcctgctgtaagaccatcctctatggtt

SEQ ID NO: 61 - DNA, 30 bp, Homo Sapien
agtcctgtggttaacgccttcatttataga

SEQ ID NO: 62 - DNA, 30 bp, Homo Sapien
acattatcagttgacagtgtacaatgcctt

SEQ ID NO: 63 - DNA, 30 bp, Homo Sapien
gagtgttgtggccgtgaggacttttctgtc

SEQ ID NO: 64 - DNA, 30 bp, Homo Sapien
cataaggagactataactctacagattgtg

SEQ ID NO: 65 - DNA, 30 bp, Homo Sapien
agggatggactaagctaatccccttttggt

SEQ ID NO: 66 - DNA, 30 bp, Homo Sapien
atagatcttgttcccccccgcacctttccc

SEQ ID NO: 67 - DNA, 30 bp, Homo Sapien
gaaggagacttaggaacctaccagttggcc

SEQ ID NO: 68 - DNA, 30 bp, Homo Sapien
atgtgccttgaacacaaagctctgtcaata

SEQ ID NO: 69 - DNA, 30 bp, Homo Sapien
gaaggaacgctaacaatttctcatacttag

SEQ ID NO: 70 - DNA, 30 bp, Homo Sapien
gatttagaccagaggtctagattaatactc

SEQ ID NO: 71 - DNA, 30 bp, Homo Sapien
taacagggtagggcatggttacatgtttag

SEQ ID NO: 72 - DNA, 30 bp, Homo Sapien
attattgaatgttgcaggtgagatgtggtt

SEQ ID NO: 73 - DNA, 30 bp, Homo Sapien
gcgtcatgcttgtgttataactactccgga

SEQ ID NO: 74 - DNA, 30 bp, Homo Sapien
ggaccatcatcctactgtaataaagatgat

SEQ ID NO: 75 - DNA, 30 bp, Homo Sapien
cacccaaattacgtttccacgagattattt

SEQ ID NO: 76 - DNA, 30 bp, Homo Sapien
atctgaagacctcgagcagatgatgccaac

SEQ ID NO: 77 - DNA, 30 bp, Homo Sapien
agacgtacgtatcagcggccccttgactct

SEQ ID NO: 78 - DNA, 30 bp, Homo Sapien
gaataggagggtaattaagactcctggtct

SEQ ID NO: 79 - DNA, 30 bp, Homo Sapien
tgtagacaggtccttttcgatggtacatat

SEQ ID NO: 80 - DNA, 30 bp, Homo Sapien
ccccccaagaacttcccatggtagaatggg

SEQ ID NO: 81 - DNA, 30 bp, Homo Sapien
gatgaaacccctgcacactattgtcagtaa

SEQ ID NO: 82 - DNA, 30 bp, Homo Sapien
cataaaataatcgttccccggattctctca

SEQ ID NO: 83 - DNA, 30 bp, Homo Sapien
ggtcagaggtatttgcttaagtgatcataa

SEQ ID NO: 84 - DNA, 30 bp, Homo Sapien
cttctctttctcgcataactccccacccct

SEQ ID NO: 85 - DNA, 30 bp, Homo Sapien
cagattaatgactggctacagagtaacaaa

SEQ ID NO: 86 - DNA, 30 bp, Homo Sapien
cactcagtgattgcaatttgcacaagtttt

SEQ ID NO: 87 - DNA, 30 bp, Homo Sapien
aaagcaaagctaggtagccatttcttctgt

SEQ ID NO: 88 - DNA, 30 bp, Homo Sapien
ctgggttttggattaacccatccttcctag

SEQ ID NO: 89 - DNA, 30 bp, Homo Sapien
aaaatgtgccaatgcctgtacattaacaga

SEQ ID NO: 90 - DNA, 30 bp, Homo Sapien
gcctgtaaccttacagtgtattcctaataa

SEQ ID NO: 91 - DNA, 30 bp, Homo Sapien
tgagtatccccagctcaggtggtgagtcct

SEQ ID NO: 92 - DNA, 30 bp, Homo Sapien
gatcactgcctttaatacagtctgttggaa

SEQ ID NO: 93 - DNA, 30 bp, Homo Sapien
gtttgcccatagtcttgaatgcaatatttg

SEQ ID NO: 94 - DNA, 30 bp, Homo Sapien
actgagcatacccagtgggccaacaagcac

SEQ ID NO: 95 - DNA, 30 bp, Homo Sapien
gttccacccaagccaatttcagacccttcg

SEQ ID NO: 96 - DNA, 30 bp, Homo Sapien
agacaaatgctcaggtagtcactgtttcct

SEQ ID NO: 97 - DNA, 30 bp, Homo Sapien
agccacccggctacctaattcctcagtaac

SEQ ID NO: 98 - DNA, 30 bp, Homo Sapien
gtcagggctatgctatgggccttctagact

SEQ ID NO: 99 - DNA, 30 bp, Homo Sapien
cagcgtttgggcttctaaccaccctgtctc

SEQ ID NO: 100 - DNA, 30 bp, Homo Sapien
cactagtcacattcttgttttaagtgcctt

SEQ ID NO: 101 - DNA, 30 bp, Homo Sapien
ggatggatggcccggattttatggcatctg

SEQ ID NO: 102 - DNA, 30 bp, Homo Sapien
ttacaagtgcaggcgactggaggcaggact

SEQ ID NO: 103 - DNA, 30 bp, Homo Sapien
ggagacttcaagattaagtgcgtggccttt

SEQ ID NO: 104 - DNA, 30 bp, Homo Sapien
tcaagcggttctgttcactaaatttttctc

SEQ ID NO: 105 - DNA, 30 bp, Homo Sapien
tgtcgacccacaatcactcacggcgcgtaa

SEQ ID NO: 106 - DNA, 30 bp, Homo Sapien
gtccattcttgcttgactctactattaagt

SEQ ID NO: 107 - DNA, 30 bp, Homo Sapien
ctcaaattggactttgggcataaaagaact

SEQ ID NO: 108 - DNA, 30 bp, Homo Sapien
ggccagtaaaatagggtaaatcctattaga

SEQ ID NO: 109 - DNA, 30 bp, Homo Sapien
tgacgagaagagctagtaatcacctgcaca

SEQ ID NO: 110 - DNA, 30 bp, Homo Sapien
tgctcctgatttaaagagatctgtgtactg

SEQ ID NO: 111 - DNA, 30 bp, Homo Sapien
aactggcatgagttggggtaatttcctatt

SEQ ID NO: 112 - DNA, 30 bp, Homo Sapien
tcactacgacaaataccgaatgcctctgca

SEQ ID NO: 113 - DNA, 30 bp, Homo Sapien
agttactgtgaactattgtctcttggagga

SEQ ID NO: 114 - DNA, 30 bp, Homo Sapien
ctgcttctgaagttatctcttaatcctctt

SEQ ID NO: 115 - DNA, 30 bp, Homo Sapien
acgactgtctatgccaatgaggctcggtgg

SEQ ID NO: 116 - DNA, 30 bp, Homo Sapien
gcatgctcgattattccctgtacaatattt

SEQ ID NO: 117 - DNA, 30 bp, Homo Sapien
tgaatttctgcaccgtttcagacttcgccc

SEQ ID NO: 118 - DNA, 30 bp, Homo Sapien
tgcccaggattgaaggtgtaaatgggacaa

SEQ ID NO: 119 - DNA, 30 bp, Homo Sapien
gtcatggtattcttcattactgtgcagttg

SEQ ID NO: 120 - DNA, 30 bp, Homo Sapien
gtccacttaccacccactttgtgtttcctt

SEQ ID NO: 121 - DNA, 30 bp, Homo Sapien
gttctgttaggagttaccttaaactgtgta

SEQ ID NO: 122 - DNA, 30 bp, Homo Sapien
cctaggttcagatcttaacttggccactta

SEQ ID NO: 123 - DNA, 30 bp, Homo Sapien
ctaaacgcccatgatagtagcttcaaactg

SEQ ID NO: 124 - DNA, 30 bp, Homo Sapien
cccaaggatgccttagcatgtgactcctga

SEQ ID NO: 125 - DNA, 30 bp, Homo Sapien
cctgttaactctccataaatttggtgattc

SEQ ID NO: 126 - DNA, 30 bp, Homo Sapien
ggtggccacacataagctcatcagcataga

SEQ ID NO: 127 - DNA, 30 bp, Homo Sapien
aaagggcactcatttggattgccttacttc

SEQ ID NO: 128 - DNA, 30 bp, Homo Sapien
gatctcataacgctggtataaggtggtctg

SEQ ID NO: 129 - DNA, 30 bp, Homo Sapien
cttggttatcctcttccaatgtgaggacac

SEQ ID NO: 130 - DNA, 30 bp, Homo Sapien
ttgttttggatgccccctaatccccttctc

SEQ ID NO: 131 - DNA, 30 bp, Homo Sapien
cccaatactctcctaaaataaacatgaagc

SEQ ID NO: 132 - DNA, 30 bp, Homo Sapien
gagttggctctacgcgaggtttgttaataa

SEQ ID NO: 133 - DNA, 30 bp, Homo Sapien
ttaaaccactcttgtgggaagttcctcttt

SEQ ID NO: 134 - DNA, 30 bp, Homo Sapien
ggtggggcttaccccctcgtatttataatc

SEQ ID NO: 135 - DNA, 30 bp, Homo Sapien
tggcccccactctcatagatgtcatccagg

SEQ ID NO: 136 - DNA, 30 bp, Homo Sapien
actaaaagatcgcagtttgcctggtgcagt

SEQ ID NO: 137 - DNA, 30 bp, Homo Sapien
caacacctggcaatgagatccctgtagagg

SEQ ID NO: 138 - DNA, 30 bp, Homo Sapien
aggaatgtcgcccattactcctcaggcctg

SEQ ID NO: 139 - DNA, 30 bp, Homo Sapien
gttgcggagttcataatgaataacacagga

SEQ ID NO: 140 - DNA, 30 bp, Homo Sapien
ccagctagggggcgttatttatggaccact

SEQ ID NO: 141 - DNA, 30 bp, Homo Sapien
ttatgagcaccatgtaagcctccttgtatt

SEQ ID NO: 142 - DNA, 30 bp, Homo Sapien
aggctgcatatggattgccaagtcagcata

SEQ ID NO: 143 - DNA, 30 bp, Homo Sapien
tcacccaagagccataatacacctattata

SEQ ID NO: 144 - DNA, 30 bp, Homo Sapien
caggcctcatttcatcacgcagcatgtgca

SEQ ID NO: 145 - DNA, 30 bp, Homo Sapien
gagatcaccgacatcatgacacagacacac

SEQ ID NO: 146 - DNA, 30 bp, Homo Sapien
aagatcacacttgtgggcaatctgggggag

SEQ ID NO: 147 - DNA, 30 bp, Homo Sapien
gagtccacaaactcgtcactcatcctccgg

SEQ ID NO: 148 - DNA, 30 bp, Homo Sapien
cagtaatagataagtgagacagattgcttg

SEQ ID NO: 149 - DNA, 30 bp, Homo Sapien
acaacatcctgactccgtcatttaataaag

SEQ ID NO: 150 - DNA, 30 bp, Homo Sapien
gggagcgttttgttgagcatgacagcctgc

SEQ ID NO: 151 - DNA, 30 bp, Homo Sapien
atccattgggccccttctaaccccagaatg

SEQ ID NO: 152 - DNA, 30 bp, Homo Sapien
tgagaatgacgatacccgtgactcagccct

SEQ ID NO: 153 - DNA, 30 bp, Homo Sapien
gttcagatcagataaagcttcttcgggctg

SEQ ID NO: 154 - DNA, 30 bp, Homo Sapien
agaaggatttcttgtattggtgaaagacgg

SEQ ID NO: 155 - DNA, 30 bp, Homo Sapien
ggtcacccctatgctggcatgaagagcatg

SEQ ID NO: 156 - DNA, 30 bp, Homo Sapien
tcttagaaatacggattcggcagccttcag

SEQ ID NO: 157 - DNA, 30 bp, Homo Sapien
agccttacgggagcacatgcgtttggtttt

SEQ ID NO: 158 - DNA, 30 bp, Homo Sapien
atgtcagataggacaacactgctgggtttt

SEQ ID NO: 159 - DNA, 30 bp, Homo Sapien
agttgcaatgtgaccagcgaaagctgcatt

SEQ ID NO: 160 - DNA, 30 bp, Homo Sapien
tttccctaactccagttattctgctgctgc

SEQ ID NO: 161 - DNA, 30 bp, Homo Sapien
cgcggaggtcctgctacccagtaaaaatcc

SEQ ID NO: 162 - DNA, 30 bp, Homo Sapien
tttggaataaagagcaggatgctgcaaagt

SEQ ID NO: 163 - DNA, 30 bp, Homo Sapien
aatatcatcaggtcatacagcagatggaac

SEQ ID NO: 164 - DNA, 30 bp, Homo Sapien
ttccttgcagttcacctcactttccgtcct

SEQ ID NO: 165 - DNA, 30 bp, Homo Sapien
cctcaaaactttactagggccaataaactt

SEQ ID NO: 166 - DNA, 30 bp, Homo Sapien
agtcacgccgtgggatgtctctgtccacat

SEQ ID NO: 167 - DNA, 30 bp, Homo Sapien
caggtatcattttggctgattgcttctttg

SEQ ID NO: 168 - DNA, 30 bp, Homo Sapien
ggcccaattcttacaaacatgtggttaatg

SEQ ID NO: 169 - DNA, 30 bp, Homo Sapien
acagtagtgtccccatgaagtgctagataa

SEQ ID NO: 170 - DNA, 30 bp, Homo Sapien
cactaactactctggcgtcaatggatattc

SEQ ID NO: 171 - DNA, 30 bp, Homo Sapien
ccacctagtctgtaactctttctgaggagc

SEQ ID NO: 172 - DNA, 30 bp, Homo Sapien
taaaagcctacctaagcatatcgtaaagct

SEQ ID NO: 173 - DNA, 30 bp, Homo Sapien
ccatgttcatttgtctacctcttaactgaa

SEQ ID NO: 174 - DNA, 30 bp, Homo Sapien
gaacgtctacttatctcaagttctatgcta

SEQ ID NO: 175 - DNA, 30 bp, Homo Sapien
gttgaaatcaaacctgccgcaacagaaatt

SEQ ID NO: 176 - DNA, 30 bp, Homo Sapien
caccatatatactagctgttaatcctatgg

SEQ ID NO: 177 - DNA, 30 bp, Homo Sapien
catcagcccccacaatttgtcagagctgaa

SEQ ID NO: 178 - DNA, 30 bp, Homo Sapien
agctaccaccctcgtatttatcatacacac

SEQ ID NO: 179 - DNA, 30 bp, Homo Sapien
ttttattgaagagggccgcaagccccaaat

SEQ ID NO: 180 - DNA, 30 bp, Homo Sapien
tctctagcccactttatatcctgccaccag

SEQ ID NO: 181 - DNA, 30 bp, Homo Sapien
ctttggcaatcagtgctcctgtaagtcaaa

SEQ ID NO: 182 - DNA, 30 bp, Homo Sapien
tgacatagatcttaggcccacttgaactct

SEQ ID NO: 183 - DNA, 30 bp, Homo Sapien
tgttcgtgtcttgcactggaattcaacatt

SEQ ID NO: 184 - DNA, 30 bp, Homo Sapien
tggtaaccctgggcctattgaaagcaggat

SEQ ID NO: 185 - DNA, 30 bp, Homo Sapien
tcatgatgctgtgcccgctatgggctgtgt

SEQ ID NO: 186 - DNA, 30 bp, Homo Sapien
tgattttgtacatagggtagggaagcagtg

SEQ ID NO: 187 - DNA, 30 bp, Homo Sapien
cacataccagcaccactactcacactacag

SEQ ID NO: 188 - DNA, 30 bp, Homo Sapien
gcgaggaacacgcacacgttctgtgcaaac

SEQ ID NO: 189 - DNA, 30 bp, Homo Sapien
agagaagacgtacctctacctgtgctatgt

SEQ ID NO: 190 - DNA, 30 bp, Homo Sapien
atatacgcgaatgaggcgccctatacccgc

SEQ ID NO: 191 - DNA, 30 bp, Homo Sapien
tgttgacttgaggagttaatgtgatctttg

SEQ ID NO: 192 - DNA, 30 bp, Homo Sapien
gtgcagcctttctcaggggactgtcattga

SEQ ID NO: 193 - DNA, 30 bp, Homo Sapien
tttgcctgtcacgtttgagtgttcctgggc

SEQ ID NO: 194 - DNA, 30 bp, Homo Sapien
acttactacctctgaacaatactcacgctg

SEQ ID NO: 195 - DNA, 30 bp, Homo Sapien
cagggtttgatagcacttaaactagttcat

SEQ ID NO: 196 - DNA, 30 bp, Homo Sapien
tggaccagtctgcattcgctggcttctcct

SEQ ID NO: 197 - DNA, 30 bp, Homo Sapien
aagatcaatggcccatgcatgctgtttgca

SEQ ID NO: 198 - DNA, 30 bp, Homo Sapien
gccgcagcagttaacctatgaccgtgcaga

SEQ ID NO: 199 - DNA, 30 bp, Homo Sapien
ttctcatgacgagttaatgcatgtccgtgg

SEQ ID NO: 200 - DNA, 30 bp, Homo Sapien
aaattccaccccatgatcaagaatcctgct

SEQ ID NO: 201 - DNA, 30 bp, Homo Sapien
acataaaatgcacgcaagccattatctctc

SEQ ID NO: 202 - DNA, 30 bp, Homo Sapien
aactggcttacgctgttggcacatttcctt

SEQ ID NO: 203 - DNA, 30 bp, Homo Sapien
gattgacttacatactacagcacatgtact

SEQ ID NO: 204 - DNA, 30 bp, Homo Sapien
tattgaggaattctcatagctctgccttat

SEQ ID NO: 205 - DNA, 30 bp, Homo Sapien
gtctgtagtctttatgatcctaaaagggaa

SEQ ID NO: 206 - DNA, 30 bp, Homo Sapien
acagagggtcgcacttggactctgagggtt

SEQ ID NO: 207 - DNA, 30 bp, Homo Sapien
ggtttggggagggacttcgttgtaatggtt

SEQ ID NO: 208 - DNA, 30 bp, Homo Sapien
ggaagaatgtacagcttatggacaaatgta

SEQ ID NO: 209 - DNA, 30 bp, Homo Sapien
tgaggtgacacagcctgtaggaacatacac

SEQ ID NO: 210 - DNA, 30 bp, Homo Sapien
gccttgattagactcctagcacctggctag

SEQ ID NO: 211 - DNA, 30 bp, Homo Sapien
cggatgcctagagtttaccttatgtttaat

SEQ ID NO: 212 - DNA, 30 bp, Homo Sapien
tagagagccacatcctgttgactgaaagtg

SEQ ID NO: 213 - DNA, 30 bp, Homo Sapien
ttctgcatgcttagagcatgttcttggaac

SEQ ID NO: 214 - DNA, 30 bp, Homo Sapien
atttgtacttgcttgagtcccatgactgtt

SEQ ID NO: 215 - DNA, 30 bp, Homo Sapien
tcctgtagtgcctctatagaagtacccaca

SEQ ID NO: 216 - DNA, 30 bp, Homo Sapien
ggacacatttgcgccaaaagtatggtaatt

SEQ ID NO: 217 - DNA, 30 bp, Homo Sapien
tcctatgcagagttacagtcacaaagttgt

SEQ ID NO: 218 - DNA, 30 bp, Homo Sapien
cagtgcagctgtaggtcgtcatcacctaac

SEQ ID NO: 219 - DNA, 30 bp, Homo Sapien
aatgaacactcttgctttattccagaatgc

SEQ ID NO: 220 - DNA, 30 bp, Homo Sapien
agacctcttgatgttttcccactggtccct

SEQ ID NO: 221 - DNA, 30 bp, Homo Sapien
tgcatttagggggcgggcttggtatgttgt

SEQ ID NO: 222 - DNA, 30 bp, Homo Sapien
ttgattcagggtctgtcttggaggcagagg

SEQ ID NO: 223 - DNA, 30 bp, Homo Sapien
gttaagtaaaaggtggctggaacatctatt

SEQ ID NO: 224 - DNA, 30 bp, Homo Sapien
agactgtgtgaagccgtttgtgtggtctcc

SEQ ID NO: 225 - DNA, 30 bp, Homo Sapien
gttttggatggagttaaacttgatgccagt

SEQ ID NO: 226 - DNA, 30 bp, Homo Sapien
tgcaatattgtgggtccaaactactctttg

SEQ ID NO: 227 - DNA, 30 bp, Homo Sapien
gtccatggatatatcaaatgtcttcacttg

SEQ ID NO: 228 - DNA, 30 bp, Homo Sapien
ccttcaacgctcccagacggtcaggaaaac

SEQ ID NO: 229 - DNA, 30 bp, Homo Sapien
gatatagcattgggctatcatgttacaaca

SEQ ID NO: 230 - DNA, 30 bp, Homo Sapien
tgctgggtttgggattaactagcattattt

SEQ ID NO: 231 - DNA, 30 bp, Homo Sapien
tctgtctttgacttacgacccattttgcaa

SEQ ID NO: 232 - DNA, 30 bp, Homo Sapien
agttgccttcagaactagtttgagctgctc

SEQ ID NO: 233 - DNA, 30 bp, Homo Sapien
gatttcttgtagatgtatccttcacgttgt

SEQ ID NO: 234 - DNA, 30 bp, Homo Sapien
gtgggctctacgtcgacagaatgagccttt

SEQ ID NO: 235 - DNA, 30 bp, Homo Sapien
ttttagcctttacacatgaggtcaaaggag

SEQ ID NO: 236 - DNA, 30 bp, Homo Sapien
ccagtcattattgttacatcatgtttgcag

SEQ ID NO: 237 - DNA, 30 bp, Homo Sapien
atcctcatggaccctagtttaaagggtatg

SEQ ID NO: 238 - DNA, 30 bp, Homo Sapien
attttccctaaccttcaaatgtgggagctt

SEQ ID NO: 239 - DNA, 30 bp, Homo Sapien
ttctctgtttcacgtagttgggttgacaag

SEQ ID NO: 240 - DNA, 30 bp, Homo Sapien
gtctgtacagttactcatgtcattgtaatg

SEQ ID NO: 241 - DNA, 30 bp, Homo Sapien
tcttgggcggacagtgtactttcctaatag

SEQ ID NO: 242 - DNA, 30 bp, Homo Sapien
tacacttgtatgtggccgtccacggcagca

SEQ ID NO: 243 - DNA, 30 bp, Homo Sapien
aacccaatcaaatataacgtgtctgacact

SEQ ID NO: 244 - DNA, 30 bp, Homo Sapien
gcattgctatgaactaatggaattggaact

SEQ ID NO: 245 - DNA, 30 bp, Homo Sapien
caatttgaatcggttttgtaggtagaggaa

SEQ ID NO: 246 - DNA, 30 bp, Homo Sapien
ctctaaatagccaacacccatctgtttttt

SEQ ID NO: 247 - DNA, 30 bp, Homo Sapien
actctgctcgccttagcactaccactcctg

SEQ ID NO: 248 - DNA, 30 bp, Homo Sapien
tctcactttagccaattcgagggctccttg

SEQ ID NO: 249 - DNA, 30 bp, Homo Sapien
tgaaaagggaattgtaaatggactgcaatg

SEQ ID NO: 250 - DNA, 30 bp, Homo Sapien
ttttgtaccctggtggtcgagtcttccctt

SEQ ID NO: 251 - DNA, 30 bp, Homo Sapien
gtgaactgtaactgacaagatgaattactc

SEQ ID NO: 252 - DNA, 30 bp, Homo Sapien
gcgagacacaacacttgtcctcttggaggt

SEQ ID NO: 253 - DNA, 30 bp, Homo Sapien
aagacaagcttgcctcgcctgacttttctg

SEQ ID NO: 254 - DNA, 30 bp, Homo Sapien
ctgaacctgcaatatcaccaaagtatgcat

SEQ ID NO: 255 - DNA, 30 bp, Homo Sapien
tctgccccaggtgtacggtttctctctgac

SEQ ID NO: 256 - DNA, 30 bp, Homo Sapien
tgggttcaaatggtatacaatttgccagct

SEQ ID NO: 257 - DNA, 30 bp, Homo Sapien
gaccttgaatcgataagtgtaaatacagct

SEQ ID NO: 258 - DNA, 30 bp, Homo Sapien
gctcaaaaaatgagctcgcatttgtcaatg

SEQ ID NO: 259 - DNA, 30 bp, Homo Sapien
cagagattccacttcacactgaaagagatg

SEQ ID NO: 260 - DNA, 30 bp, Homo Sapien
ttatttgggagattgttcacggaaaacaga

SEQ ID NO: 261 - DNA, 30 bp, Homo Sapien
cttgctgtacataggctagctatttctaaa

SEQ ID NO: 262 - DNA, 30 bp, Homo Sapien
ttctccacctagactgtaaacctctcgagg

SEQ ID NO: 263 - DNA, 30 bp, Homo Sapien
tccagtctcttgtacagcgttttaaaagaa

SEQ ID NO: 264 - DNA, 30 bp, Homo Sapien
tgttccgatagtgtctcgcgggcgaaacca

SEQ ID NO: 265 - DNA, 30 bp, Homo Sapien
ccagtattgtgtctaaattctgtggatgat

SEQ ID NO: 266 - DNA, 30 bp, Homo Sapien
tgactattaacggcgggcgaaacgaaaata

SEQ ID NO: 267 - DNA, 30 bp, Homo Sapien
agttttaagggacgtcagtgtttatgccat

SEQ ID NO: 268 - DNA, 30 bp, Homo Sapien
cccgtgggttgcttacctacctataaggtg

SEQ ID NO: 269 - DNA, 30 bp, Homo Sapien
taagtcattgctgactgcatagctcttttt

SEQ ID NO: 270 - DNA, 30 bp, Homo Sapien
ctgacacctgtcatatttatggaccagaca

SEQ ID NO: 271 - DNA, 30 bp, Homo Sapien
ggactaagacactacccatataattcccag

SEQ ID NO: 272 - DNA, 30 bp, Homo Sapien
cttgggctaatctggctgagtagtcagtta

SEQ ID NO: 273 - DNA, 30 bp, Homo Sapien
caaatctcatgaccttgccaaaatcttggc

SEQ ID NO: 274 - DNA, 30 bp, Homo Sapien
cccgcggagtaacctggcgacatatttaga

SEQ ID NO: 275 - DNA, 30 bp, Homo Sapien
ctgtactgatagtacttcccagtatgatat

SEQ ID NO: 276 - DNA, 30 bp, Homo Sapien
cagctaattcaagacactgtagtcacttgt

SEQ ID NO: 277 - DNA, 30 bp, Homo Sapien
tttcctaattgtaaactaggccaacctgaa

SEQ ID NO: 278 - DNA, 30 bp, Homo Sapien
acctcattggtaaagggctagagcctttct

SEQ ID NO: 279 - DNA, 30 bp, Homo Sapien
ctgcacttactccttttgctaataaaagtg

SEQ ID NO: 280 - DNA, 30 bp, Homo Sapien
ctcctgtcactcagtacaattattttgaga

SEQ ID NO: 281 - DNA, 30 bp, Homo Sapien
caaaggtaactaggaaagcattcatctgct

SEQ ID NO: 282 - DNA, 30 bp, Homo Sapien
tcgtctctgtagtgatgacttcctgtcctc

SEQ ID NO: 283 - DNA, 30 bp, Homo Sapien
atttgcagcagggtttgtctttgtgaattc

SEQ ID NO: 284 - DNA, 30 bp, Homo Sapien
agaagaagacgaggtctacaatgccattcc

SEQ ID NO: 285 - DNA, 30 bp, Homo Sapien
actgtgactgagtcggcccattctgtttag

SEQ ID NO: 286 - DNA, 30 bp, Homo Sapien
tgggagtggtcgattatgtactactttgac

SEQ ID NO: 287 - DNA, 30 bp, Homo Sapien
aatgcagtatagttaaaatggcttcccaca

SEQ ID NO: 288 - DNA, 30 bp, Homo Sapien
gaagggaacgtgaccggattccctcactgt

SEQ ID NO: 289 - DNA, 30 bp, Homo Sapien
aataaggttccgtccgcgtgctgggtcaga

SEQ ID NO: 290 - DNA, 30 bp, Homo Sapien
gttctggtcaatcatgttgaaagcctcctt

SEQ ID NO: 291 - DNA, 30 bp, Homo Sapien
tcatagaaggctctggtggtacctctgggc

SEQ ID NO: 292 - DNA, 30 bp, Homo Sapien
ccaactctgtggcataacctcaaagccata

SEQ ID NO: 293 - DNA, 30 bp, Homo Sapien
ttgggttacttcagatgcctaacaccttcc

SEQ ID NO: 294 - DNA, 30 bp, Homo Sapien
gctatccaggagtgctctgaaggctttggg

SEQ ID NO: 295 - DNA, 30 bp, Homo Sapien
gctttgtgctccagatattctagttggaac

SEQ ID NO: 296 - DNA, 30 bp, Homo Sapien
cccaccatctgtttgaagattatatgaagt

SEQ ID NO: 297 - DNA, 30 bp, Homo Sapien
agccttgagaaaccggcagttcccaagcca

SEQ ID NO: 298 - DNA, 30 bp, Homo Sapien
tgtgaaattaggttggggttgcaacatctt

SEQ ID NO: 299 - DNA, 30 bp, Homo Sapien
agtttttacatcacatccattgatctgcct

SEQ ID NO: 300 - DNA, 30 bp, Homo Sapien
acagagaacggaacttaggtgtgtctctac

SEQ ID NO: 301 - DNA, 30 bp, Homo Sapien
tgactttgacgcttgcgaactagagatgtg

SEQ ID NO: 302 - DNA, 30 bp, Homo Sapien
gctacagtggatctattcaaagcttaactt

SEQ ID NO: 303 - DNA, 30 bp, Homo Sapien
gctgtaacaggagtggaatgtacatattta

SEQ ID NO: 304 - DNA, 30 bp, Homo Sapien
cttcaaaatgctgacgctttggagagtaag

SEQ ID NO: 305 - DNA, 30 bp, Homo Sapien
agctattttgtatgcaactagtcactgctg

SEQ ID NO: 306 - DNA, 30 bp, Homo Sapien
agcacaaaaatttagtctgctggctgactg

SEQ ID NO: 307 - DNA, 30 bp, Homo Sapien
tttcctataagaaatttagggcagggcacg

SEQ ID NO: 308 - DNA, 30 bp, Homo Sapien
ctctgtattgttctgaccctggtaaatata

SEQ ID NO: 309 - DNA, 30 bp, Homo Sapien
tagtaaaaagtaataattaggcccaggcac

SEQ ID NO: 310 - DNA, 30 bp, Homo Sapien
gctagtattgccacagacgcattaaaagaa

SEQ ID NO: 311 - DNA, 30 bp, Homo Sapien
cttccccttgactcatatgttttaacatga

SEQ ID NO: 312 - DNA, 30 bp, Homo Sapien
gtttgctagctcacttgtccatgaaaatat

SEQ ID NO: 313 - DNA, 30 bp, Homo Sapien
tggatgcattttgtggtgggccccctagag

SEQ ID NO: 314 - DNA, 30 bp, Homo Sapien
gtttcaaaatgaacagcgaagccttaactt

SEQ ID NO: 315 - DNA, 30 bp, Homo Sapien
ctagtataccctgtcaatacaactttcatc

SEQ ID NO: 316 - DNA, 30 bp, Homo Sapien
actttgtaagcttgtatgtggttgttgatc

SEQ ID NO: 317 - DNA, 30 bp, Homo Sapien
acatttccatagagaccgtgtggtttttgt

SEQ ID NO: 318 - DNA, 30 bp, Homo Sapien
ttagggaggagtgcctactacccaaagaaa

SEQ ID NO: 319 - DNA, 30 bp, Homo Sapien
agaaacaggatgccccagtaaacatgattt

SEQ ID NO: 320 - DNA, 30 bp, Homo Sapien
tggtaagtagtttccaagttacgtgttgtc

SEQ ID NO: 321 - DNA, 30 bp, Homo Sapien
tttcctacaatctgactcaactgccaggtg

SEQ ID NO: 322 - DNA, 30 bp, Homo Sapien
ttgcttagatgatgacgttgtggattcatt

SEQ ID NO: 323 - DNA, 30 bp, Homo Sapien
gatcaggtttagacaatgagctttggttgt

SEQ ID NO: 324 - DNA, 30 bp, Homo Sapien
gcaccttcattagtacagcttgcatattta

SEQ ID NO: 325 - DNA, 30 bp, Homo Sapien
ttgctttcaccctgcggtattgttttccct

SEQ ID NO: 326 - DNA, 30 bp, Homo Sapien
atatcactagtgccaagacataaagcgggg

SEQ ID NO: 327 - DNA, 30 bp, Homo Sapien
gtgtctgggtgttacagtctgtgcccactg

SEQ ID NO: 328 - DNA, 30 bp, Homo Sapien
atagctgtgcaaagccttttaacctgactt

SEQ ID NO: 329 - DNA, 30 bp, Homo Sapien
tggttgaactgctaggttgaatgagagact

SEQ ID NO: 330 - DNA, 30 bp, Homo Sapien
gaaaaagctcccacagtatgtggcgtctga

SEQ ID NO: 331 - DNA, 30 bp, Homo Sapien
cactcagtttgtcttctagtactcagctca

SEQ ID NO: 332 - DNA, 30 bp, Homo Sapien
cgagccatttgtcccaagtgccaaagaagc

SEQ ID NO: 333 - DNA, 30 bp, Homo Sapien
ctggggattccacagagttgacctctctga

SEQ ID NO: 334 - DNA, 30 bp, Homo Sapien
atgtacccagtattctaggtagtgccctat

SEQ ID NO: 335 - DNA, 30 bp, Homo Sapien
cagcaccaacatgtaaccggcatgtttcca

SEQ ID NO: 336 - DNA, 30 bp, Homo Sapien
ccaaatgtaactcccacattgagtttatct

SEQ ID NO: 337 - DNA, 30 bp, Homo Sapien
aaggttcctcaattttgcgaaaggggcaac

SEQ ID NO: 338 - DNA, 30 bp, Homo Sapien
taagacttagaataaggaggtggggaatgt

SEQ ID NO: 339 - DNA, 30 bp, Homo Sapien
agaaacaacgcaaccgacgacgcacaacgc

SEQ ID NO: 340 - DNA, 30 bp, Homo Sapien
aactgttgtttctttgccacatgtgttgta

SEQ ID NO: 341 - DNA, 30 bp, Homo Sapien
agcgctctaaccctgcatattatttacttg

SEQ ID NO: 342 - DNA, 30 bp, Homo Sapien
tggaataaatgacgacgtaaacgtagctgc

SEQ ID NO: 343 - DNA, 30 bp, Homo Sapien
ggggtgtttgatgactttgacagaataaat

SEQ ID NO: 344 - DNA, 30 bp, Homo Sapien
catttccctgcttaccatagggattttaaa

SEQ ID NO: 345 - DNA, 30 bp, Homo Sapien
ccagcacacaattttgatttcaattagcct

SEQ ID NO: 346 - DNA, 30 bp, Homo Sapien
catgtgtatgaattgttggtgctctaaaga

SEQ ID NO: 347 - DNA, 30 bp, Homo Sapien
gcagtttttcgagatattccgtagtacata

SEQ ID NO: 348 - DNA, 30 bp, Homo Sapien
ccatgtctatctcaggggcccgttacctct

SEQ ID NO: 349 - DNA, 30 bp, Homo Sapien
ttaacaagttaatcaggcgctacaaatacc

SEQ ID NO: 350 - DNA, 30 bp, Homo Sapien
aattccaactgtggaccttttatatgtgcc

SEQ ID NO: 351 - DNA, 30 bp, Homo Sapien
ggtacattgtagagccgaactttgagttac

SEQ ID NO: 352 - DNA, 30 bp, Homo Sapien
ttactacttggccaccacgcagccttggct

SEQ ID NO: 353 - DNA, 30 bp, Homo Sapien
acctgaggcttatctttgcacatgttaaag

SEQ ID NO: 354 - DNA, 30 bp, Homo Sapien
tgtggaagggagtcgttacgctgcagatcg

SEQ ID NO: 355 - DNA, 30 bp, Homo Sapien
atgaacgggtagacaaggactgagattgcc

SEQ ID NO: 356 - DNA, 30 bp, Homo Sapien
cactgctggatgttgaaggtaacttaataa

SEQ ID NO: 357 - DNA, 30 bp, Homo Sapien
gagaatacaacaacgatgcggcacgaggaa

SEQ ID NO: 358 - DNA, 30 bp, Homo Sapien
cctccctttcctatagagataaaagtgatt

SEQ ID NO: 359 - DNA, 30 bp, Homo Sapien
atcagctgttgtaatcacctagcaaactgg

SEQ ID NO: 360 - DNA, 30 bp, Homo Sapien
ccatcagtagatatggtttgtacaatgtac

SEQ ID NO: 361 - DNA, 30 bp, Homo Sapien
cacccatgagaattagacattattctcctt

SEQ ID NO: 362 - DNA, 30 bp, Homo Sapien
gtcttacctctcaataaaagggtacttttc

SEQ ID NO: 363 - DNA, 30 bp, Homo Sapien
gtggaaatagttgtggatgtactaagagta

SEQ ID NO: 364 - DNA, 30 bp, Homo Sapien
ttagtgacccactgaccgtatttgaacaaa

SEQ ID NO: 365 - DNA, 30 bp, Homo Sapien
ctttgctagctaacctgactccgggtgagg

SEQ ID NO: 366 - DNA, 30 bp, Homo Sapien
tttcgtaacacagcattgtatatgtgaagc

SEQ ID NO: 367 - DNA, 30 bp, Homo Sapien
tgactaaagctgacctaaatggatcagttt

SEQ ID NO: 368 - DNA, 30 bp, Homo Sapien
gggatcatccttcctggcaaataaattccc

SEQ ID NO: 369 - DNA, 30 bp, Homo Sapien
ttgatcgttggtgggttgctagcctttcag

SEQ ID NO: 370 - DNA, 30 bp, Homo Sapien
tcagtgcattactatgggaggagcaactaa

SEQ ID NO: 371 - DNA, 30 bp, Homo Sapien
ccaactacttttcatgaagagtgctttgaa

SEQ ID NO: 372 - DNA, 30 bp, Homo Sapien
accaacctgtttctacctatatgcagtctc

SEQ ID NO: 373 - DNA, 30 bp, Homo Sapien
ctgagaggaggggtaaatatatgttttgag

SEQ ID NO: 374 - DNA, 30 bp, Homo Sapien
cctgcaaaccagaacgactctagaatttcc

SEQ ID NO: 375 - DNA, 30 bp, Homo Sapien
gacagtaaatataataccgctgtttccttg

SEQ ID NO: 376 - DNA, 30 bp, Homo Sapien
attaccttagccacagggtggctgagcagg

SEQ ID NO: 377 - DNA, 30 bp, Homo Sapien
tggtgtggcttaacggtatttcagaaggtc

SEQ ID NO: 378 - DNA, 30 bp, Homo Sapien
acacttttgatattagcccccgcgggaccc

SEQ ID NO: 379 - DNA, 30 bp, Homo Sapien
cctctctgaaatagccgaactccaggctgg

SEQ ID NO: 380 - DNA, 30 bp, Homo Sapien
aggataccagaccactgtaatcaataagaa

SEQ ID NO: 381 - DNA, 30 bp, Homo Sapien
gatgtgttcgacgttttatcaaaggccccc

SEQ ID NO: 382 - DNA, 30 bp, Homo Sapien
caggtgcttgaacttgtcagtttgttttaa

SEQ ID NO: 383 - DNA, 30 bp, Homo Sapien
ctggaagttggacctgcgtgcttcctctga

SEQ ID NO: 384 - DNA, 30 bp, Homo Sapien
gcagagatcggccctactagatgcagagac

SEQ ID NO: 385 - DNA, 30 bp, Homo Sapien
cttatggattgagatgtgatcaaaggcttt

SEQ ID NO: 386 - DNA, 30 bp, Homo Sapien
aaagacttattgtagcccgtgaacacattg

SEQ ID NO: 387 - DNA, 30 bp, Homo Sapien
atatccacgtcacggatgcttccatgcccg

SEQ ID NO: 388 - DNA, 30 bp, Homo Sapien
tcccgagcaaaggtctaaagtttacagtaa

SEQ ID NO: 389 - DNA, 30 bp, Homo Sapien
ttccgtgggatgccataaaagccgcccagt

SEQ ID NO: 390 - DNA, 30 bp, Homo Sapien
catggccctgccatgctctccaaaccactt

SEQ ID NO: 391 - DNA, 30 bp, Homo Sapien
ctgtattgagttgtatcgtgtggtgtattt

SEQ ID NO: 392 - DNA, 30 bp, Homo Sapien
ctcaaataggccagaacaactcactaatta

SEQ ID NO: 393 - DNA, 30 bp, Homo Sapien
gaacaaagctcaaagtatgcaatgcttcat

SEQ ID NO: 394 - DNA, 30 bp, Homo Sapien
gaacttgcctaactaactggcaggggagac

SEQ ID NO: 395 - DNA, 30 bp, Homo Sapien
ccaactccgtgtggtaagcaacatggcttt

SEQ ID NO: 396 - DNA, 30 bp, Homo Sapien
gccaaaattcgctatgtttacagtgatact

SEQ ID NO: 397 - DNA, 30 bp, Homo Sapien
aggaagctagggttctatgaatggacttca

SEQ ID NO: 398 - DNA, 30 bp, Homo Sapien
accacggtgtaccgggatattaaacctctt

SEQ ID NO: 399 - DNA, 30 bp, Homo Sapien
ttaccagtgaatctttgtcagcagttccct

SEQ ID NO: 400 - DNA, 30 bp, Homo Sapien
gattcccttgttattcaacagcaagtgtga

SEQ ID NO: 401 - DNA, 30 bp, Homo Sapien
tggacggaccccagggttattattgccttt

SEQ ID NO: 402 - DNA, 30 bp, Homo Sapien
atagatcttaggcaaaataccagctgatga

SEQ ID NO: 403 - DNA, 30 bp, Homo Sapien
aatcgtgacaacacttgtgttatgaagcat

SEQ ID NO: 404 - DNA, 30 bp, Homo Sapien
gttggtagcacttaagacttatacttgcct

SEQ ID NO: 405 - DNA, 30 bp, Homo Sapien
agcatgtaatagagtgtgctaaacagaaag

SEQ ID NO: 406 - DNA, 30 bp, Homo Sapien
gcataatggtaaatcttttggggtcatctt

SEQ ID NO: 407 - DNA, 30 bp, Homo Sapien
tttattccagtaaggaacggcccttttagt

SEQ ID NO: 408 - DNA, 30 bp, Homo Sapien
atgatgcacttattcaatagctgtcagccg

SEQ ID NO: 409 - DNA, 30 bp, Homo Sapien
cttgaatgtaaccgctttaagaaaggttct

SEQ ID NO: 410 - DNA, 30 bp, Homo Sapien
tcattaaatggggctcacaaaccatgcaaa

SEQ ID NO: 411 - DNA, 30 bp, Homo Sapien
caatcctttgatcataaattctccccaact

SEQ ID NO: 412 - DNA, 30 bp, Homo Sapien
cataagtggttaagcaagtattctcgttac

SEQ ID NO: 413 - DNA, 30 bp, Homo Sapien
acactggtagaacgtaaccacggaaaagag

SEQ ID NO: 414 - DNA, 30 bp, Homo Sapien
ggttgagtaatgctcgtctgtgtgttttag

SEQ ID NO: 415 - DNA, 30 bp, Homo Sapien
agccttatggcagaatagaggtatttttag

SEQ ID NO: 416 - DNA, 30 bp, Homo Sapien
ataagaggcaggatatataagcgccagtgg

SEQ ID NO: 417 - DNA, 30 bp, Homo Sapien
gaatgattggcttgagatagattggtggaa

SEQ ID NO: 418 - DNA, 30 bp, Homo Sapien
tggatcccagggaaatatcagccttgggca

SEQ ID NO: 419 - DNA, 30 bp, Homo Sapien
ttggattatgcccatgaacaagttagtttc

SEQ ID NO: 420 - DNA, 30 bp, Homo Sapien
cttcagtgtaccgcgtctaccctgggattc

SEQ ID NO: 421 - DNA, 30 bp, Homo Sapien
tgacaacctcttggtcgaccttagtaccta

SEQ ID NO: 422 - DNA, 30 bp, Homo Sapien
tgagacgcacacacattctaacctcccgcc

SEQ ID NO: 423 - DNA, 30 bp, Homo Sapien
ctgaatcgagatgtccatagtcaaatttgt

SEQ ID NO: 424 - DNA, 30 bp, Homo Sapien
tgcggagcctgtaataattgagggacaggc

SEQ ID NO: 425 - DNA, 30 bp, Homo Sapien
ccctactattcagtggcgagaaataaagtt

SEQ ID NO: 426 - DNA, 30 bp, Homo Sapien
acacacgctgcatagagctctccttgaaaa

SEQ ID NO: 427 - DNA, 30 bp, Homo Sapien
catgcaagtgtaataacatatctcctgaag

SEQ ID NO: 428 - DNA, 30 bp, Homo Sapien
ttttaaaagggtcgttaccagagatttacc

SEQ ID NO: 429 - DNA, 30 bp, Homo Sapien
cctgggctaagtcatttaaactgggtcttt

SEQ ID NO: 430 - DNA, 30 bp, Homo Sapien
ccctggacttagccaccagagagctacatt

SEQ ID NO: 431 - DNA, 30 bp, Homo Sapien
ctttcaggattagttcgttccaaggaggct

SEQ ID NO: 432 - DNA, 30 bp, Homo Sapien
actcaacagtttccagtcatggccaaatgt

SEQ ID NO: 433 - DNA, 30 bp, Homo Sapien
cattaatgaactcattcagtcaccatagca

SEQ ID NO: 434 - DNA, 30 bp, Homo Sapien
atcaggattatggtttcccgttctgaaatt

SEQ ID NO: 435 - DNA, 30 bp, Homo Sapien
gtaaaaaaggaacacccggaaagactgaaa

SEQ ID NO: 436 - DNA, 30 bp, Homo Sapien
gggactttaggcatgattaaaatatggaca

SEQ ID NO: 437 - DNA, 30 bp, Homo Sapien
tgagaggcagctgcgtttctgcaacctatg

SEQ ID NO: 438 - DNA, 30 bp, Homo Sapien
ctgagagggacattactgatgggagtgagg

SEQ ID NO: 439 - DNA, 30 bp, Homo Sapien
gttacaaactctgtgtcattccccgctcat

SEQ ID NO: 440 - DNA, 30 bp, Homo Sapien
aacctggttttttcccgtgtgaggaatgcc

SEQ ID NO: 441 - DNA, 30 bp, Homo Sapien
acccatgaaggtaactaacggaaggaaaaa

SEQ ID NO: 442 - DNA, 30 bp, Homo Sapien
agagcgagccgaacacaaaggagacgaaca

SEQ ID NO: 443 - DNA, 30 bp, Homo Sapien
actcacacgtatggaatacccctgcacgcg

SEQ ID NO: 444 - DNA, 30 bp, Homo Sapien
gagttttttgtacgattcctgcaacttttc

SEQ ID NO: 445 - DNA, 30 bp, Homo Sapien
tagttatgtatagcagaactggcagttgtc

SEQ ID NO: 446 - DNA, 30 bp, Homo Sapien
ttaatgatccgtgtgtaccatctttgtgat

SEQ ID NO: 447 - DNA, 30 bp, Homo Sapien
cgagtggaccattatcactttaaagccctt

SEQ ID NO: 448 - DNA, 30 bp, Homo Sapien
cgatttcccaggctgaattgggagtgagat

SEQ ID NO: 449 - DNA, 30 bp, Homo Sapien
cgaaaacgcctgacacgaagagcgagacaa

SEQ ID NO: 450 - DNA, 30 bp, Homo Sapien
gaaaagagactaggtgaagagagggcaggg

SEQ ID NO: 451 - DNA, 30 bp, Homo Sapien
ggcatacaaggagtatgatttaacagtatg

SEQ ID NO: 452 - DNA, 30 bp, Homo Sapien
tgatgacgtaggacatgtgcttggtacaaa

SEQ ID NO: 453 - DNA, 30 bp, Homo Sapien
gctaatgaagattactgacctgcgaagcat

SEQ ID NO: 454 - DNA, 30 bp, Homo Sapien
ggtggtcttgatgccttaggcctctcttgt

SEQ ID NO: 455 - DNA, 30 bp, Homo Sapien
tcttgcgtggtgctcgaagggctctttgga

SEQ ID NO: 456 - DNA, 30 bp, Homo Sapien
aagagagtggtgccgtccgacaaaacacgg

SEQ ID NO: 457 - DNA, 30 bp, Homo Sapien
gccaaacagaattaacgcaactaataacct

SEQ ID NO: 458 - DNA, 30 bp, Homo Sapien
cctgcatataccaatagcattacctatgac

SEQ ID NO: 459 - DNA, 30 bp, Homo Sapien
aaggagagcaggtagagcgaagcagacgag

SEQ ID NO: 460 - DNA, 30 bp, Homo Sapien
catagagactaactagcggggagaggagca

SEQ ID NO: 461 - DNA, 30 bp, Homo Sapien
catatattcatgtgtcatcgttcaggaaca

SEQ ID NO: 462 - DNA, 30 bp, Homo Sapien
gcactatgttgaactattaaacttaccagc

SEQ ID NO: 463 - DNA, 30 bp, Homo Sapien
gttcttggagtcgaacatctgctgggtgag

SEQ ID NO: 464 - DNA, 30 bp, Homo Sapien
tcaggtggtcaggcgtagatcaccagaata

SEQ ID NO: 465 - DNA, 30 bp, Homo Sapien
attgatgtaaaccacgtgagaggaaaatgt

SEQ ID NO: 466 - DNA, 30 bp, Homo Sapien
gctgtatcaagggtgggcttagctgtgcct

SEQ ID NO: 467 - DNA, 30 bp, Homo Sapien
tccctaaagaccctaaatctgaggaatcaa

SEQ ID NO: 468 - DNA, 30 bp, Homo Sapien
cattgtactaataccgggaacatgaagcca

SEQ ID NO: 469 - DNA, 30 bp, Homo Sapien
cccaactgatatgttcatagaatgacagtt

SEQ ID NO: 470 - DNA, 30 bp, Homo Sapien
gcactccagctaacaaaagattgacaataa

SEQ ID NO: 471 - DNA, 30 bp, Homo Sapien
cattctttgcagctaattaagccgaagaag

SEQ ID NO: 472 - DNA, 30 bp, Homo Sapien
agatgcactaccattgctgttctacttttt

SEQ ID NO: 473 - DNA, 30 bp, Homo Sapien
aatgcgaacaggtacctatctgtttctaaa

SEQ ID NO: 474 - DNA, 30 bp, Homo Sapien
atcgttagggtgaagcattatggtctaatg

SEQ ID NO: 475 - DNA, 30 bp, Homo Sapien
gtgaactatgaagtaagcaacaaggatgac

SEQ ID NO: 476 - DNA, 30 bp, Homo Sapien
agcaaaccggggcctactagagtctgaaca

SEQ ID NO: 477 - DNA, 30 bp, Homo Sapien
gttgtggccaagtacaaattatggtatcta

SEQ ID NO: 478 - DNA, 30 bp, Homo Sapien
tctgcataatcaaaggggtagcacaaataa

SEQ ID NO: 479 - DNA, 30 bp, Homo Sapien
aagcgaagagcaacgcacgagagaaacgac

SEQ ID NO: 480 - DNA, 30 bp, Homo Sapien
ctccatacagtgtactcttattcttggcaa

SEQ ID NO: 481 - DNA, 30 bp, Homo Sapien
gtctgtgtaacatccaagccagagttttta

SEQ ID NO: 482 - DNA, 30 bp, Homo Sapien
aagactggggtcttttgcgaaagggattgc

SEQ ID NO: 483 - DNA, 30 bp, Homo Sapien
ataccacctccaccgctgagcagtgacctt

SEQ ID NO: 484 - DNA, 30 bp, Homo Sapien
gcaaactgcaaatagtagttcctgaagtgt

SEQ ID NO: 485 - DNA, 30 bp, Homo Sapien
cctgtgaaagtcggattcgaataaagggcc

SEQ ID NO: 486 - DNA, 30 bp, Homo Sapien
aacaatgatggacttcaattgtactcactg

SEQ ID NO: 487 - DNA, 30 bp, Homo Sapien
tgtgctgtcaataaacggtttgaggattgc

SEQ ID NO: 488 - DNA, 30 bp, Homo Sapien
tggcacttgtaactcaccgtgctgtcttct

SEQ ID NO: 489 - DNA, 30 bp, Homo Sapien
cttcaagatcatgtaccccaatttacttgc

SEQ ID NO: 490 - DNA, 30 bp, Homo Sapien
agatacgaacaacgcaaccgcacgcagcca

SEQ ID NO: 491 - DNA, 30 bp, Homo Sapien
ccctggatgcagacgccctgtacaatcaag

SEQ ID NO: 492 - DNA, 30 bp, Homo Sapien
gggcgatgacagttgtttctatgccttctg

SEQ ID NO: 493 - DNA, 30 bp, Homo Sapien
ccaccaattcatgcgctatcaaatgtatta

SEQ ID NO: 494 - DNA, 30 bp, Homo Sapien
agagtcatgtgagcctcgtgtcatctccgg

SEQ ID NO: 495 - DNA, 30 bp, Homo Sapien
cagcatactaaccagacagcgacacgcaga

SEQ ID NO: 496 - DNA, 30 bp, Homo Sapien
acataggccaaggcccaactaacagtcaag

SEQ ID NO: 497 - DNA, 30 bp, Homo Sapien
agggagccatttggtggcgctgcttgtctt

SEQ ID NO: 498 - DNA, 30 bp, Homo Sapien
aagccctggatcactcgccagaacttctcc

SEQ ID NO: 499 - DNA, 30 bp, Homo Sapien
ctgaaaaggaattgagaagtaattcctctg

SEQ ID NO: 500 - DNA, 30 bp, Homo Sapien
gacattaggtcagccactagatgtatttgt

SEQ ID NO: 501 - DNA, 30 bp, Homo Sapien
cccgcgctgaaatttggcgtgaattaaact

SEQ ID NO: 502 - DNA, 30 bp, Homo Sapien
gttatggatgtcagggggaattgaaagacc

SEQ ID NO: 503 - DNA, 30 bp, Homo Sapien
cccttgccgttacttacgaaacacccaaaa

SEQ ID NO: 504 - DNA, 30 bp, Homo Sapien
ttttggtagtcttcaaccagggattgtttc

SEQ ID NO: 505 - DNA, 30 bp, Homo Sapien
ccgctgccgtctttgaataccctgggaact

SEQ ID NO: 506 - DNA, 30 bp, Homo Sapien
ccaaggacactgtgttataagaggcgtggg

SEQ ID NO: 507 - DNA, 30 bp, Homo Sapien
tctggctacgcacacacttgggcagctgaa

SEQ ID NO: 508 - DNA, 30 bp, Homo Sapien
ccatgtggattttgggggtcccttttgtgt

SEQ ID NO: 509 - DNA, 30 bp, Homo Sapien
ctcataccacttgtttctgccgtgctcatg

SEQ ID NO: 510 - DNA, 30 bp, Homo Sapien
gctgtaataaagaagccgatctctcctctg

SEQ ID NO: 511 - DNA, 30 bp, Homo Sapien
acacggactgtgcatactttccctcatcca

SEQ ID NO: 512 - DNA, 30 bp, Homo Sapien
tagtatttgggcatggcttacacctgtcat

SEQ ID NO: 513 - DNA, 30 bp, Homo Sapien
aagctgggtaatcgatgggggagtctgaag

SEQ ID NO: 514 - DNA, 30 bp, Homo Sapien
aatgctgtctggttgcgccatttttgtgct

SEQ ID NO: 515 - DNA, 30 bp, Homo Sapien
tggacaaatcgccagagatgtggtaagtga

SEQ ID NO: 516 - DNA, 30 bp, Homo Sapien
gttgttgttgaagtgtggagttgtaactct

SEQ ID NO: 517 - DNA, 30 bp, Homo Sapien
aagacggcagaacgagtaagaacagacagg

SEQ ID NO: 518 - DNA, 30 bp, Homo Sapien
cccactttctatagcagattgtgtaacaat

SEQ ID NO: 519 - DNA, 30 bp, Homo Sapien
atgcatgtcctgtaaaggttacaagcctgc

SEQ ID NO: 520 - DNA, 30 bp, Homo Sapien
agctgccttttaagaggtcttatctgttca

SEQ ID NO: 521 - DNA, 30 bp, Homo Sapien
agttacagggtgatgcttagagagggcttg

SEQ ID NO: 522 - DNA, 30 bp, Homo Sapien
cactaaagatcacgtaccatatgattccat

SEQ ID NO: 523 - DNA, 30 bp, Homo Sapien
ttcatgacgctctcgatattcctgtgcaga

SEQ ID NO: 524 - DNA, 30 bp, Homo Sapien
tctagaaaactccttaccatttgtcttagg

SEQ ID NO: 525 - DNA, 30 bp, Homo Sapien
ctctttcctcgcgccgtgccgtttttacct

SEQ ID NO: 526 - DNA, 30 bp, Homo Sapien
cttatcttggctttcgagtctgagtttaaa

SEQ ID NO: 527 - DNA, 30 bp, Homo Sapien
agatgaagggtgaggacaatcgtgtatatg

SEQ ID NO: 528 - DNA, 30 bp, Homo Sapien
cataactgccaggttccgacttctgtccac

SEQ ID NO: 529 - DNA, 30 bp, Homo Sapien
ctgcaagggattgtagataacactgacttg

SEQ ID NO: 530 - DNA, 30 bp, Homo Sapien
ggtcatagtgggtggatttgttgccatgtg

SEQ ID NO: 531 - DNA, 30 bp, Homo Sapien
tgttggtcttcaggaggggaagtttgctgt

SEQ ID NO: 532 - DNA, 30 bp, Homo Sapien
ttctgctttcgattcgttaagagagcaaca

SEQ ID NO: 533 - DNA, 30 bp, Homo Sapien
ccaatgtatcaatgtagagttgctctgttt

SEQ ID NO: 534 - DNA, 30 bp, Homo Sapien
aataggataatatattcagggtgcagggtg

SEQ ID NO: 535 - DNA, 30 bp, Homo Sapien
ccaaaagttacatgtttgcacctttctagt

SEQ ID NO: 536 - DNA, 30 bp, Homo Sapien
cagactcgatgtgtactctaacttaagaaa

SEQ ID NO: 537 - DNA, 30 bp, Homo Sapien
gccacaaattcataaccacttatccttcca

SEQ ID NO: 538 - DNA, 30 bp, Homo Sapien
acaacaagacaacgcacgaacaacgagcgg

SEQ ID NO: 539 - DNA, 30 bp, Homo Sapien
atgggtagcctgggtgtaaaacctggagat

SEQ ID NO: 540 - DNA, 30 bp, Homo Sapien
ggagtcgatataaggcgtacggcagaatgc

SEQ ID NO: 541 - DNA, 30 bp, Homo Sapien
tgattcttctgaccctagaaatgttccctt

SEQ ID NO: 542 - DNA, 30 bp, Homo Sapien
ccaagactttactagtgccgataaactttc

SEQ ID NO: 543 - DNA, 30 bp, Homo Sapien
ctcattgggtaagtcatttaccactctgtg

SEQ ID NO: 544 - DNA, 30 bp, Homo Sapien
tattgcccatgggatatgtggtgtatatcc

SEQ ID NO: 545 - DNA, 30 bp, Homo Sapien
ggtacttaaagcttctatggttgacattgt

SEQ ID NO: 546 - DNA, 30 bp, Homo Sapien
accaaacctcatatgtgaaatggccaaagc

SEQ ID NO: 547 - DNA, 30 bp, Homo Sapien
cagattccacgttcttgttccgatactctg

SEQ ID NO: 548 - DNA, 30 bp, Homo Sapien
tggaaatgcgtgtaacagtactgcaataat

SEQ ID NO: 549 - DNA, 30 bp, Homo Sapien
catgagtggtggctaacctgaccaataaag

SEQ ID NO: 550 - DNA, 30 bp, Homo Sapien
ccttggtatttagtttggtgaatacttgca

SEQ ID NO: 551 - DNA, 30 bp, Homo Sapien
cccacaaacacgaaacgggaatccattttt

SEQ ID NO: 552 - DNA, 30 bp, Homo Sapien
gaaggatggtattcagactcgaaaccgcaa

SEQ ID NO: 553 - DNA, 30 bp, Homo Sapien
ccctacaccaagagtgtatctgtgaaagag

SEQ ID NO: 554 - DNA, 30 bp, Homo Sapien
gtaaacaaactgtgtaactgcccaaagcag

SEQ ID NO: 555 - DNA, 30 bp, Homo Sapien
cctcttcacccatcaacgctgtgctttgcc

SEQ ID NO: 556 - DNA, 30 bp, Homo Sapien
accagaattctaggtgcgagtctcagctgt

SEQ ID NO: 557 - DNA, 30 bp, Homo Sapien
ccttcaaaaggaccctgttcactgctgcac

SEQ ID NO: 558 - DNA, 30 bp, Homo Sapien
atagcatttggtaggtagtgattaactgtg

SEQ ID NO: 559 - DNA, 30 bp, Homo Sapien
cttacttctctcctgtcagttggtgctccc

SEQ ID NO: 560 - DNA, 30 bp, Homo Sapien
agacagcaggttaatacctagatctcattt

SEQ ID NO: 561 - DNA, 30 bp, Homo Sapien
ccatgcaaaactgtagatcaataaaacctc

SEQ ID NO: 562 - DNA, 30 bp, Homo Sapien
attttgggtagacgtaatcttcaccctttc

SEQ ID NO: 563 - DNA, 30 bp, Homo Sapien
ggaatctttggggattaaccaacctccttt

SEQ ID NO: 564 - DNA, 30 bp, Homo Sapien
aatccacaatctgacattctcaggaagccc

SEQ ID NO: 565 - DNA, 30 bp, Homo Sapien
gtgtgccatagaggacagcaactggtgatt

SEQ ID NO: 566 - DNA, 30 bp, Homo Sapien
caaatctgcctgataggacccatattccca

SEQ ID NO: 567 - DNA, 30 bp, Homo Sapien
tgtgtacccgaggggtaatgattaaatgat

SEQ ID NO: 568 - DNA, 30 bp, Homo Sapien
gcacagcaaacttgtaggaattagtatcaa

SEQ ID NO: 569 - DNA, 30 bp, Homo Sapien
tttttaacacatagcgccgtgctgtaaata

SEQ ID NO: 570 - DNA, 30 bp, Homo Sapien
gtgcatttagacttatgtggaactgtacaa

SEQ ID NO: 571 - DNA, 30 bp, Homo Sapien
acacagaaaaattccgtttggtagactcct

SEQ ID NO: 572 - DNA, 30 bp, Homo Sapien
tccagttctgtgcggcatgagaaaggggct

SEQ ID NO: 573 - DNA, 30 bp, Homo Sapien
tgtgtttattgaatggtgattgcctgcttt

SEQ ID NO: 574 - DNA, 30 bp, Homo Sapien
aggcacaagaacacgagacaacgcagacac

SEQ ID NO: 575 - DNA, 30 bp, Homo Sapien
cacataagtgcatcttgcggggcagtgagt

SEQ ID NO: 576 - DNA, 30 bp, Homo Sapien
gaaactggactcgtacgactctttttatat

SEQ ID NO: 577 - DNA, 30 bp, Homo Sapien
tacactaacatttcccccgagctcttggcc

SEQ ID NO: 578 - DNA, 30 bp, Homo Sapien
tatgcttgaatgccacgcggtacaaaggaa

SEQ ID NO: 579 - DNA, 30 bp, Homo Sapien
gcctagttttgtacatggatctcattttac

SEQ ID NO: 580 - DNA, 30 bp, Homo Sapien
tgagctgcgcttgcgtggctgtttcatgac

SEQ ID NO: 581 - DNA, 30 bp, Homo Sapien
gcttaccaaaggatagtgcgatgtttcagg

SEQ ID NO: 582 - DNA, 30 bp, Homo Sapien
gaaacacgcacttagtctctaaagagttta

SEQ ID NO: 583 - DNA, 30 bp, Homo Sapien
tgcagggtcgttgtcaggttatgtgagaaa

SEQ ID NO: 584 - DNA, 30 bp, Homo Sapien
accaaccgcgttgatggacacccactgtgt

SEQ ID NO: 585 - DNA, 30 bp, Homo Sapien
aacggagagaaggacacgacgacagagcag

SEQ ID NO: 586 - DNA, 30 bp, Homo Sapien
acataagatgcctccgtgagaggctggtgg

SEQ ID NO: 587 - DNA, 30 bp, Homo Sapien
gatccatgcgatactatgtgtgcattattt

SEQ ID NO: 588 - DNA, 30 bp, Homo Sapien
agtcaagggagtagccggggtagtggctta

SEQ ID NO: 589 - DNA, 30 bp, Homo Sapien
gaaaagcacggctgtatataatggtgatgt

SEQ ID NO: 590 - DNA, 30 bp, Homo Sapien
agcatttaatatggatgccgtgggagtaca

SEQ ID NO: 591 - DNA, 30 bp, Homo Sapien
ggcgttgtggctctaagattaaacgacttt

SEQ ID NO: 592 - DNA, 30 bp, Homo Sapien
cctgcttaaggtgttctaattttctgtgag

SEQ ID NO: 593 - DNA, 30 bp, Homo Sapien
tcactcatcgcagttctccccacggctact

SEQ ID NO: 594 - DNA, 30 bp, Homo Sapien
tctttgcagtagcaccagttaaggtgaata

SEQ ID NO: 595 - DNA, 30 bp, Homo Sapien
gatcgtctccaattcgaaaacaaccgtcct

SEQ ID NO: 596 - DNA, 30 bp, Homo Sapien
cctactttggtagtggaatagtgaatactt

SEQ ID NO: 597 - DNA, 30 bp, Homo Sapien
ccactaacttctgtaatgtaagattgagtc

SEQ ID NO: 598 - DNA, 30 bp, Homo Sapien
gcgcatggctgaaatcctaggcgagaagaa

SEQ ID NO: 599 - DNA, 30 bp, Homo Sapien
ccgctgtattaaaggaagtggcagtgtcct

SEQ ID NO: 600 - DNA, 30 bp, Homo Sapien
ccctgccgccctaacaataggagatagaag

SEQ ID NO: 601 - DNA, 30 bp, Homo Sapien
tcaccccctttggttcattctcccgaatgt

SEQ ID NO: 602 - DNA, 30 bp, Homo Sapien
ctggttactgtatcccagtgaccagccaca

SEQ ID NO: 603 - DNA, 30 bp, Homo Sapien
ttgaccggaggagaaacgtcttcgaggtcg

SEQ ID NO: 604 - DNA, 30 bp, Homo Sapien
ggcaagggataactcttctaacacaaaata

SEQ ID NO: 605 - DNA, 30 bp, Homo Sapien
agagaaggggaagcactcgtgtgcaacaga

SEQ ID NO: 606 - DNA, 30 bp, Homo Sapien
tctataatgccaaaatgacacatctgtgca

SEQ ID NO: 607 - DNA, 30 bp, Homo Sapien
tgtcctcattctcccctatatgacatgcaa

SEQ ID NO: 608 - DNA, 30 bp, Homo Sapien
atgtcctatattggctaaattgaaacctgg

SEQ ID NO: 609 - DNA, 30 bp, Homo Sapien
cccttgaaccaataaaggaacaaatgacta

SEQ ID NO: 610 - DNA, 30 bp, Homo Sapien
gtaagttatgttttacatgccccgtttttg

SEQ ID NO: 611 - DNA, 30 bp, Homo Sapien
ttcagccctcagaatcgctccaccttgcag

SEQ ID NO: 612 - DNA, 30 bp, Homo Sapien
gctcctggtgctaacaacaaagttccactt

SEQ ID NO: 613 - DNA, 30 bp, Homo Sapien
tgcactatcccacacacgtactcaccacgc

SEQ ID NO: 614 - DNA, 30 bp, Homo Sapien
tttccttgttccaatttgacaaaacccact

SEQ ID NO: 615 - DNA, 30 bp, Homo Sapien
acagcgcacgacagcacgaagcggaaaaac

SEQ ID NO: 616 - DNA, 30 bp, Homo Sapien
ttaatgccaccacacgtgttccgcttctct

SEQ ID NO: 617 - DNA, 30 bp, Homo Sapien
aaaacttgttttgtgatccggctctcagga

SEQ ID NO: 618 - DNA, 30 bp, Homo Sapien
gttgaacatcaaggagatctacaaaatcct

SEQ ID NO: 619 - DNA, 30 bp, Homo Sapien
atgcccggctcttaggaattttgtctgttt

SEQ ID NO: 620 - DNA, 30 bp, Homo Sapien
tcatgctctgaggtactactgcctctgcag

SEQ ID NO: 621 - DNA, 30 bp, Homo Sapien
tcagcctggttttcgtcatcttccctgccc

SEQ ID NO: 622 - DNA, 30 bp, Homo Sapien
aagtgaacacacacgaccaacagcagcgcg

SEQ ID NO: 623 - DNA, 30 bp, Homo Sapien
tcttctgataacacttgttaggcctcttac

SEQ ID NO: 624 - DNA, 30 bp, Homo Sapien
cacgtgaacttgtgcgtgtctctggcagtg

SEQ ID NO: 625 - DNA, 30 bp, Homo Sapien
ggactcacgttaactcacatttatacagca

SEQ ID NO: 626 - DNA, 30 bp, Homo Sapien
gctgtaccctctgccgatggcatttgtgtt

SEQ ID NO: 627 - DNA, 30 bp, Homo Sapien
cattcttcagcgtggctatcagttgggcag

SEQ ID NO: 628 - DNA, 30 bp, Homo Sapien
tcaaccccgtgaggtgagtattaatattac

SEQ ID NO: 629 - DNA, 30 bp, Homo Sapien
ggcattgctgactgtgtatataggataatt

SEQ ID NO: 630 - DNA, 30 bp, Homo Sapien
ccttttagcctagttcatccaatcctcact

SEQ ID NO: 631 - DNA, 30 bp, Homo Sapien
cactctcctctggacctaaacctgaaatcc

SEQ ID NO: 632 - DNA, 30 bp, Homo Sapien
tatctgttggccattactatacatgtgcaa

SEQ ID NO: 633 - DNA, 30 bp, Homo Sapien
gaacccattgcaaccaagtcgaagtgatag

SEQ ID NO: 634 - DNA, 30 bp, Homo Sapien
aataaagccgtccgtgggacgactgacctc

SEQ ID NO: 635 - DNA, 30 bp, Homo Sapien
tgcgaaggacgagacttcctcttgaacagt

SEQ ID NO: 636 - DNA, 30 bp, Homo Sapien
gttcatctttcgtcctgtgtctgactttct

SEQ ID NO: 637 - DNA, 30 bp, Homo Sapien
tatatggggggagtgagctctctcagaccc

SEQ ID NO: 638 - DNA, 30 bp, Homo Sapien
atagatcccctgagaggtatctgagaagaa

SEQ ID NO: 639 - DNA, 30 bp, Homo Sapien
aagacgagacgcaaacgagccaagcagagg

SEQ ID NO: 640 - DNA, 30 bp, Homo Sapien
tagcatataagccaggcatgtctcccgagg

SEQ ID NO: 641 - DNA, 30 bp, Homo Sapien
cacattttaagttggatggtgtgctctaaa

SEQ ID NO: 642 - DNA, 30 bp, Homo Sapien
atgtgacaacaattgctaaagcaaaccttg

SEQ ID NO: 643 - DNA, 30 bp, Homo Sapien
tctccctgaccctgtatatagcccagccag

SEQ ID NO: 644 - DNA, 30 bp, Homo Sapien
cagtaagtgccttggaacaatattgaattc

SEQ ID NO: 645 - DNA, 30 bp, Homo Sapien
tttctagattgccagctcatgacatggtgc

SEQ ID NO: 646 - DNA, 30 bp, Homo Sapien
actggacttctcccgtctctagggctgcat

SEQ ID NO: 647 - DNA, 30 bp, Homo Sapien
acagaatgcgactgctgatttaccgatgta

SEQ ID NO: 648 - DNA, 30 bp, Homo Sapien
aggctagctcggcactacactagggaattt

SEQ ID NO: 649 - DNA, 30 bp, Homo Sapien
tttcttaggggacacgtcctcctttcacag

SEQ ID NO: 650 - DNA, 30 bp, Homo Sapien
tgtccaaaggatgtaatccttcataggttt

SEQ ID NO: 651 - DNA, 30 bp, Homo Sapien
acaagtagcagggtattgcctttgattcaa

SEQ ID NO: 652 - DNA, 30 bp, Homo Sapien
gcttataccatggaatgaggacaaggtgat

SEQ ID NO: 653 - DNA, 30 bp, Homo Sapien
gcaattgagtgactcctttccatatgaatt

SEQ ID NO: 654 - DNA, 30 bp, Homo Sapien
aggaactggtagtcttgtttgggtgatgag

SEQ ID NO: 655 - DNA, 30 bp, Homo Sapien
tgacctgtcctagtaacaaaactcgcaaaa

SEQ ID NO: 656 - DNA, 30 bp, Homo Sapien
acgggattctccacggtatcctgtggttcc

SEQ ID NO: 657 - DNA, 30 bp, Homo Sapien
cattagttgtctgtcaaggaaggtgagtgg

SEQ ID NO: 658 - DNA, 30 bp, Homo Sapien
cagctccttttccgttctgttctgctggga

SEQ ID NO: 659 - DNA, 30 bp, Homo Sapien
gcgcagaagtgtgaccgactgaatcataaa

SEQ ID NO: 660 - DNA, 30 bp, Homo Sapien
ctcgcgttctgatgacacgtctactaaaac

SEQ ID NO: 661 - DNA, 30 bp, Homo Sapien
agaaatgttctgactaggagtggttattga

SEQ ID NO: 662 - DNA, 30 bp, Homo Sapien
cagagtctatataaagagagaactaacgcc

SEQ ID NO: 663 - DNA, 30 bp, Homo Sapien
atgttggcgtacacgttgcaggctgcgtga

SEQ ID NO: 664 - DNA, 30 bp, Homo Sapien
cctcttctatggactggttgttgccaaaca

SEQ ID NO: 665 - DNA, 30 bp, Homo Sapien
gttatgacgaaccatccgcccgccaagctt

SEQ ID NO: 666 - DNA, 30 bp, Homo Sapien
attaccactcaaacgcgaaacacaatcaaa

SEQ ID NO: 667 - DNA, 30 bp, Homo Sapien
aacgatagagacagaacgcatgcgcgcagg

SEQ ID NO: 668 - DNA, 30 bp, Homo Sapien
tcaagctagaaggccacatgtcaccgtgga

SEQ ID NO: 669 - DNA, 30 bp, Homo Sapien
gtactgaagagtgacggacttctgaggctg

SEQ ID NO: 670 - DNA, 30 bp, Homo Sapien
agcgagacaaacgcgagcataggacaccca

SEQ ID NO: 671 - DNA, 30 bp, Homo Sapien
acgtctccagcacacctgaagaactggagg

SEQ ID NO: 672 - DNA, 30 bp, Homo Sapien
gctgttctctttctaacatgttgtggtaaa

SEQ ID NO: 673 - DNA, 30 bp, Homo Sapien
tattaccggcctcgtcggtgtggtctgtct

SEQ ID NO: 674 - DNA, 30 bp, Homo Sapien
tcatgaggtccttccatatttagattgggt

SEQ ID NO: 675 - DNA, 30 bp, Homo Sapien
gtgcgtcaccgtccactcctcctactgtat

SEQ ID NO: 676 - DNA, 30 bp, Homo Sapien
ttgtcaccaccatcgcatacagcatccggg

SEQ ID NO: 677 - DNA, 30 bp, Homo Sapien
aagtggactgtggcatgacattctgcaata

SEQ ID NO: 678 - DNA, 30 bp, Homo Sapien
catagtgctaaaagcagaactgccattcca

SEQ ID NO: 679 - DNA, 30 bp, Homo Sapien
ccaaaatcaagagtgagatgtagaaagttg

SEQ ID NO: 680 - DNA, 30 bp, Homo Sapien
gaaggggcggttctcctcgaccttagatga

SEQ ID NO: 681 - DNA, 30 bp, Homo Sapien
gttcaaagagagaattatatgctggcgcgg

SEQ ID NO: 682 - DNA, 30 bp, Homo Sapien
cttcttgacgcttttcataatgtgcaaagt

SEQ ID NO: 683 - DNA, 30 bp, Homo Sapien
tgccctcattccgacttcagaaaatcgaag

SEQ ID NO: 684 - DNA, 30 bp, Homo Sapien
tctctgtgcctaatgttcctcaatgtggtt

SEQ ID NO: 685 - DNA, 30 bp, Homo Sapien
gcatggtaagttcccttagctatatgaatt

SEQ ID NO: 686 - DNA, 30 bp, Homo Sapien
gacataccatgagaatgcggcactgacggg

SEQ ID NO: 687 - DNA, 30 bp, Homo Sapien
gtgaggatgtatcgggaagatttctaaata

SEQ ID NO: 688 - DNA, 30 bp, Homo Sapien
gacctgtcctgtatataacagcactgtagc

SEQ ID NO: 689 - DNA, 30 bp, Homo Sapien
cccaaataattgttgtgtgtatgatacgtg

SEQ ID NO: 690 - DNA, 30 bp, Homo Sapien
cgccactacgcctctactacacgaacacaa

SEQ ID NO: 691 - DNA, 30 bp, Homo Sapien
gaatgaaatatcagactagtgacaagctcc

SEQ ID NO: 692 - DNA, 30 bp, Homo Sapien
tcaaaggccaatgatacttcgcataattca

SEQ ID NO: 693 - DNA, 30 bp, Homo Sapien
cccatgcccactctttaggcacaaatgcag

SEQ ID NO: 694 - DNA, 30 bp, Homo Sapien
tcctttgattgatcactctccctgacatcc

SEQ ID NO: 695 - DNA, 30 bp, Homo Sapien
aaatgaaattgcggccattgatctctaacc

SEQ ID NO: 696 - DNA, 30 bp, Homo Sapien
aaagggaaccaatgccgaagaccgagggca

SEQ ID NO: 697 - DNA, 30 bp, Homo Sapien
attttactcttggaatagtgggtggatagc

SEQ ID NO: 698 - DNA, 30 bp, Homo Sapien
gagaggaaacgagtagggacaaacacgagg

SEQ ID NO: 699 - DNA, 30 bp, Homo Sapien
aatgggacttgtgacggtgtacctgaggcc

SEQ ID NO: 700 - DNA, 30 bp, Homo Sapien
aggacaaaacgggttactaagatgaaattg

SEQ ID NO: 701 - DNA, 30 bp, Homo Sapien
ttcttggttgagattggttggttgagactc

SEQ ID NO: 702 - DNA, 30 bp, Homo Sapien
tccgagtctccgtgcgtgcaatgatttctc

SEQ ID NO: 703 - DNA, 30 bp, Homo Sapien
gtgctcagttgtagaatgtattgtaccttt

SEQ ID NO: 704 - DNA, 30 bp, Homo Sapien
tgtatcggaagcatataccttggagggacc

SEQ ID NO: 705 - DNA, 30 bp, Homo Sapien
tcagtttctggctagcaactagaagttttg

SEQ ID NO: 706 - DNA, 30 bp, Homo Sapien
ggtggcacatggatgaatgagtatttaata

SEQ ID NO: 707 - DNA, 30 bp, Homo Sapien
ccttacaaggttatgtagagagataccatc

SEQ ID NO: 708 - DNA, 30 bp, Homo Sapien
cctacagtgtacagtcttgtattaagttgt

SEQ ID NO: 709 - DNA, 30 bp, Homo Sapien
tgaccctcctactccacattgcaacatttc

SEQ ID NO: 710 - DNA, 30 bp, Homo Sapien
atagactgccccgacagtctacaagcctca

SEQ ID NO: 711 - DNA, 30 bp, Homo Sapien
gtggacagagatatgcccagagatgcatat

SEQ ID NO: 712 - DNA, 30 bp, Homo Sapien
tacccctgaggtcccatgtgccatgagtgt

SEQ ID NO: 713 - DNA, 30 bp, Homo Sapien
agactcagaccgcgacacagccaccgtatt

SEQ ID NO: 714 - DNA, 30 bp, Homo Sapien
gaaatttgcatacccgtaaagggagacttt

SEQ ID NO: 715 - DNA, 30 bp, Homo Sapien
cagattggaataaagcctattctaccagtt

SEQ ID NO: 716 - DNA, 30 bp, Homo Sapien
caccaggtgcctttcaaatttagaaactaa

SEQ ID NO: 717 - DNA, 30 bp, Homo Sapien
tgaaagaacccttccttacctggtgtgttt

SEQ ID NO: 718 - DNA, 30 bp, Homo Sapien
acttctcccgccgtattggttgcggacctt

SEQ ID NO: 719 - DNA, 30 bp, Homo Sapien
aaggagcgaccgaagacaagcgaacgagac

SEQ ID NO: 720 - DNA, 30 bp, Homo Sapien
cttagtggaatgtgtgtctaacttgctctc

SEQ ID NO: 721 - DNA, 30 bp, Homo Sapien
atgttccgcaagctcaaccacctcctggag

SEQ ID NO: 722 - DNA, 30 bp, Homo Sapien
tcctcccctgtaatacttagcaggccagtt

SEQ ID NO: 723 - DNA, 30 bp, Homo Sapien
gtccccatttttaacctcagccttccctac

SEQ ID NO: 724 - DNA, 30 bp, Homo Sapien
aggcagcgggatctcgtatctttaaaaagc

SEQ ID NO: 725 - DNA, 30 bp, Homo Sapien
ctgccctgtcaaaggtccctatttgaaatg

SEQ ID NO: 726 - DNA, 30 bp, Homo Sapien
gtaggttagatgctattaagaaggcactta

SEQ ID NO: 727 - DNA, 30 bp, Homo Sapien
ttggtccttctatcactaaaactcatctca

SEQ ID NO: 728 - DNA, 30 bp, Homo Sapien
tttctgaatgaccggaagttcttctgatct

SEQ ID NO: 729 - DNA, 30 bp, Homo Sapien
acatggtaaacgctgtccctagtaaaaatg

SEQ ID NO: 730 - DNA, 30 bp, Homo Sapien
gctttgtaccggatctgctgaagcatctgt

SEQ ID NO: 731 - DNA, 30 bp, Homo Sapien
tggatgggactccatagctccttcccagga

SEQ ID NO: 732 - DNA, 30 bp, Homo Sapien
agggccaataataagaagtggacaatacag

SEQ ID NO: 733 - DNA, 30 bp, Homo Sapien
atggaagcacttccagaacttcacctccat

SEQ ID NO: 734 - DNA, 30 bp, Homo Sapien
agactccgtgggagaagctcattcccacat

SEQ ID NO: 735 - DNA, 30 bp, Homo Sapien
gtattctgtgtcaggtattgggctggacag

SEQ ID NO: 736 - DNA, 30 bp, Homo Sapien
cctgcacctttcagatttcttggtggcatt

SEQ ID NO: 737 - DNA, 30 bp, Homo Sapien
attaaaggtatcacggtcgccacctggcat

SEQ ID NO: 738 - DNA, 30 bp, Homo Sapien
acacagacggaagggacaaggagcggaaca

SEQ ID NO: 739 - DNA, 30 bp, Homo Sapien
ttgctgcgtgttgatttggaggcactgcag

SEQ ID NO: 740 - DNA, 30 bp, Homo Sapien
cttaaaaggttgcatactgagccaagtata

SEQ ID NO: 741 - DNA, 30 bp, Homo Sapien
tattttacgtggagcatcattgtgtgactg

SEQ ID NO: 742 - DNA, 30 bp, Homo Sapien
taaacccctgggtaactgtcaagtcatgat

SEQ ID NO: 743 - DNA, 30 bp, Homo Sapien
acatacgcagggggaaggcttggagtagac

SEQ ID NO: 744 - DNA, 30 bp, Homo Sapien
gttgtcactggtggctcattcagggaagct

SEQ ID NO: 745 - DNA, 30 bp, Homo Sapien
ttgctgcatatttgtgccgtaattatgtac

SEQ ID NO: 746 - DNA, 30 bp, Homo Sapien
cttgggagggacgcatagaaggagctctag

SEQ ID NO: 747 - DNA, 30 bp, Homo Sapien
taactgtcagtgtacacgtctggaccccgt

SEQ ID NO: 748 - DNA, 30 bp, Homo Sapien
gaaactcgaacttgctatgtaatttgtgtc

SEQ ID NO: 749 - DNA, 30 bp, Homo Sapien
tggagcattgatctgcatccaaggccttct

SEQ ID NO: 750 - DNA, 30 bp, Homo Sapien
cttacagtttggaatacaacatgtgaaggt

SEQ ID NO: 751 - DNA, 30 bp, Homo Sapien
gagtgtgaatgatcaagtcctttgtgaata

SEQ ID NO: 752 - DNA, 30 bp, Homo Sapien
aaggacagaaccacgacacgacacagagaa

SEQ ID NO: 753 - DNA, 30 bp, Homo Sapien
tttttatgcagacagtctgttatgcactgt

SEQ ID NO: 754 - DNA, 30 bp, Homo Sapien
gaaatctagccagtgtgtagacaatgttga

SEQ ID NO: 755 - DNA, 30 bp, Homo Sapien
taaaacagagatattaggagctccatcact

SEQ ID NO: 756 - DNA, 30 bp, Homo Sapien
tccccaccccgatagtgacacatcttcagg

SEQ ID NO: 757 - DNA, 30 bp, Homo Sapien
acgcaaggactagcggagacaagacagagg

SEQ ID NO: 758 - DNA, 30 bp, Homo Sapien
tgtttgtaaaaagggccagacaaaggggca

SEQ ID NO: 759 - DNA, 30 bp, Homo Sapien
gctcttagaatgtaagcgttcacgaaaata

SEQ ID NO: 760 - DNA, 30 bp, Homo Sapien
ctggttcggatttggggtggattttggttt

SEQ ID NO: 761 - DNA, 30 bp, Homo Sapien
acagggagaagggataaccctacacccaga

SEQ ID NO: 762 - DNA, 30 bp, Homo Sapien
ggctattcagagtggtcagggagcttagag

SEQ ID NO: 763 - DNA, 30 bp, Homo Sapien
ctttaagatcccctgtaagaatgtttaagg

SEQ ID NO: 764 - DNA, 30 bp, Homo Sapien
aaggactccaatgtcgaactcttctttgct

SEQ ID NO: 765 - DNA, 30 bp, Homo Sapien
caagtatccagacctgatcgctgagctgct

SEQ ID NO: 766 - DNA, 30 bp, Homo Sapien
ctgaacactcattacactaaacacctcttg

SEQ ID NO: 767 - DNA, 30 bp, Homo Sapien
gacaatcagccggcctataaatctccttat

SEQ ID NO: 768 - DNA, 30 bp, Homo Sapien
ttcttgtatcccttttacagtcaaagtcca

SEQ ID NO: 769 - DNA, 30 bp, Homo Sapien
tcatggatagctgcaatttctcactttaca

SEQ ID NO: 770 - DNA, 30 bp, Homo Sapien
catcctgccaagctgcgttatattctgtac

SEQ ID NO: 771 - DNA, 30 bp, Homo Sapien
gttggggacagaaaagtgtgtagaccttct

SEQ ID NO: 772 - DNA, 30 bp, Homo Sapien
gtcaccagatctgatttgtaacccactgag

SEQ ID NO: 773 - DNA, 30 bp, Homo Sapien
gtttctgacaataactgggaaggttttttc

SEQ ID NO: 774 - DNA, 30 bp, Homo Sapien
tcaacccccaactgaggaccactgtcctac

SEQ ID NO: 775 - DNA, 30 bp, Homo Sapien
catgaaactccaccttgcggggataaagag

SEQ ID NO: 776 - DNA, 30 bp, Homo Sapien
cactctcttatttgtgcattcggtttggtt

SEQ ID NO: 777 - DNA, 30 bp, Homo Sapien
agcatgtccctaccgagtctcttctccact

SEQ ID NO: 778 - DNA, 30 bp, Homo Sapien
ctgctatcgctatttaagaaccctaaatct

SEQ ID NO: 779 - DNA, 30 bp, Homo Sapien
tgtgcctgtctacctgcgcgtttgctgtac

SEQ ID NO: 780 - DNA, 30 bp, Homo Sapien
cccacagtatattggttattggtcctgaag

SEQ ID NO: 781 - DNA, 30 bp, Homo Sapien
tgcaacaggcttgtgcaacaataaatgttg

SEQ ID NO: 782 - DNA, 30 bp, Homo Sapien
gaaaagcagatggtctgactgtgctatggc

SEQ ID NO: 783 - DNA, 30 bp, Homo Sapien
gatctcagttctgcgtttattgtaagttga

SEQ ID NO: 784 - DNA, 30 bp, Homo Sapien
acaacaattgagacacaagcggtccctctc

SEQ ID NO: 785 - DNA, 30 bp, Homo Sapien
ggcttgcttctatgggctttgcaccaccct

SEQ ID NO: 786 - DNA, 30 bp, Homo Sapien
catcactgagactgccggatccctgaaagt

SEQ ID NO: 787 - DNA, 30 bp, Homo Sapien
ccctagtaagcccagttgctgtatctgaac

SEQ ID NO: 788 - DNA, 30 bp, Homo Sapien
tagttctatgtgatgtaaaggtctagggag

SEQ ID NO: 789 - DNA, 30 bp, Homo Sapien
gaataggtaggttagtagcccttcagtctt

SEQ ID NO: 790 - DNA, 30 bp, Homo Sapien
gagtttaggttgtatgaattctacaaccct

SEQ ID NO: 791 - DNA, 30 bp, Homo Sapien
atgaagacatagccgattctctgcccgggc

SEQ ID NO: 792 - DNA, 30 bp, Homo Sapien
cctgttaagttcgtatctaaacctaagaca

SEQ ID NO: 793 - DNA, 30 bp, Homo Sapien
ggtttcataacttcctgtacttgaagtcta

SEQ ID NO: 794 - DNA, 30 bp, Homo Sapien
accagcaggtggtctatatccatccttcca

SEQ ID NO: 795 - DNA, 30 bp, Homo Sapien
gctcattaagaagtgcagcaggttaagaat

SEQ ID NO: 796 - DNA, 30 bp, Homo Sapien
ctacgtgacctatgacatcctgcagtgccc

SEQ ID NO: 797 - DNA, 30 bp, Homo Sapien
accaggcctacagtcaaactccagagatgc

SEQ ID NO: 798 - DNA, 30 bp, Homo Sapien
catggtggagcgtgacgattgtcccagcta

SEQ ID NO: 799 - DNA, 30 bp, Homo Sapien
ctagtgtagcttctgaaaggtgctttctcc

SEQ ID NO: 800 - DNA, 30 bp, Homo Sapien
catgttacagaactcttcaggaatagagaa

SEQ ID NO: 801 - DNA, 30 bp, Homo Sapien
tccctcccactattaaacagtctgtttccg

SEQ ID NO: 802 - DNA, 30 bp, Homo Sapien
aagtgatcctgcgatagggaacgcgccctt

SEQ ID NO: 803 - DNA, 30 bp, Homo Sapien
ctccccatttggtcccctggactgtctttg

SEQ ID NO: 804 - DNA, 30 bp, Homo Sapien
cacaactgtaaatattgggctagatagaac

SEQ ID NO: 805 - DNA, 30 bp, Homo Sapien
ttctaagtggcgtgtgcatagcgtcctgcc

SEQ ID NO: 806 - DNA, 30 bp, Homo Sapien
ctcaaagcatccagtgaacactggaagagg

SEQ ID NO: 807 - DNA, 30 bp, Homo Sapien
gtaacgggcacggatcacgatgtaaattat

SEQ ID NO: 808 - DNA, 30 bp, Homo Sapien
catgatggtaataaacgagatgtttgccaa

SEQ ID NO: 809 - DNA, 30 bp, Homo Sapien
aacttctctccgccccggttttctttcccc

SEQ ID NO: 810 - DNA, 30 bp, Homo Sapien
ttcagcaaacaagtgctagcttcactgacc

SEQ ID NO: 811 - DNA, 30 bp, Homo Sapien
gcataccaattacccataaacagcacacct

SEQ ID NO: 812 - DNA, 30 bp, Homo Sapien
aggcctgggtgatttatttattgggaaagt

SEQ ID NO: 813 - DNA, 30 bp, Homo Sapien
gggcaatatgaaagcatatatcacgttttg

SEQ ID NO: 814 - DNA, 30 bp, Homo Sapien
ggggttcagcctaacagttatggaaactac

SEQ ID NO: 815 - DNA, 30 bp, Homo Sapien
ttattggaaagtgtaacggggaccttctgc

SEQ ID NO: 816 - DNA, 30 bp, Homo Sapien
gtcctccagcagagtaacattattgttctc

SEQ ID NO: 817 - DNA, 30 bp, Homo Sapien
acaccacctagggcaacctacttgttttac

SEQ ID NO: 818 - DNA, 30 bp, Homo Sapien
attgttgaggtggtctgaatgttctgacat

SEQ ID NO: 819 - DNA, 30 bp, Homo Sapien
ttgaccctccatgtgtaccatagagggggg

SEQ ID NO: 820 - DNA, 30 bp, Homo Sapien
acagggagggaccaataaatcataatgaag

SEQ ID NO: 821 - DNA, 30 bp, Homo Sapien
gggctagtacttagtttcacacccgggagc

SEQ ID NO: 822 - DNA, 30 bp, Homo Sapien
taccatagtgcgatgtcgttttgtgctatt

SEQ ID NO: 823 - DNA, 30 bp, Homo Sapien
acccgggaaagtacgtctagattgtgtggt

SEQ ID NO: 824 - DNA, 30 bp, Homo Sapien
gaaggttggggtatttgtcttgagaattaa

SEQ ID NO: 825 - DNA, 30 bp, Homo Sapien
aggcaatgattaagttaggcaatttccagt

SEQ ID NO: 826 - DNA, 30 bp, Homo Sapien
caggactttatctaatacctctgtgtgctc

SEQ ID NO: 827 - DNA, 30 bp, Homo Sapien
atgacggtgtacttactgccttgtagcaaa

SEQ ID NO: 828 - DNA, 30 bp, Homo Sapien
cctctgctgcagcgttcaacttgtgtgttt

SEQ ID NO: 829 - DNA, 30 bp, Homo Sapien
aacatgccctgttcagctactcccactccc

SEQ ID NO: 830 - DNA, 30 bp, Homo Sapien
tttttaacaggattggggtgtccaaactgc

SEQ ID NO: 831 - DNA, 30 bp, Homo Sapien
gatcccatcgtgaccgacggtgtttgtgta

SEQ ID NO: 832 - DNA, 30 bp, Homo Sapien
aaaactgttggtgaggtagtgtttcagtta

SEQ ID NO: 833 - DNA, 30 bp, Homo Sapien
gatcatccgcaggctatgttaaaaggattt

SEQ ID NO: 834 - DNA, 30 bp, Homo Sapien
atgggcatctatgggagagtgtcaaccaga

SEQ ID NO: 835 - DNA, 30 bp, Homo Sapien
gtcctagaagggaccctcctgtggtctttg

SEQ ID NO: 836 - DNA, 30 bp, Homo Sapien
ccgaatcttctgtgttcgttcttctttgct

SEQ ID NO: 837 - DNA, 30 bp, Homo Sapien
gatgaattccactggtggcagtagcagtgg

SEQ ID NO: 838 - DNA, 30 bp, Homo Sapien
ttatttaaagggaccttattttctgcccct

SEQ ID NO: 839 - DNA, 30 bp, Homo Sapien
ttttggactcctatcccgttatgtctgggc

SEQ ID NO: 840 - DNA, 30 bp, Homo Sapien
agcctgcgtacggctctcatcaactccact

SEQ ID NO: 841 - DNA, 30 bp, Homo Sapien
ttaacccctttggtactctcctgcatctcc

SEQ ID NO: 842 - DNA, 30 bp, Homo Sapien
gcttatctgaaagtagtgcttaaacctgat

SEQ ID NO: 843 - DNA, 30 bp, Homo Sapien
tcacgcgtacctctacttatcaactaacgt

SEQ ID NO: 844 - DNA, 30 bp, Homo Sapien
ggagtaagagttaataaacacactcacgaa

SEQ ID NO: 845 - DNA, 30 bp, Homo Sapien
gtgacaagactaagcattaagatgagaaag

SEQ ID NO: 846 - DNA, 30 bp, Homo Sapien
aggatcagatctgtgagcacgttggcgagg

SEQ ID NO: 847 - DNA, 30 bp, Homo Sapien
actttcgaatcacaccataccttgattgag

SEQ ID NO: 848 - DNA, 30 bp, Homo Sapien
aagctgggtctcatgtttgagacaagttcc

SEQ ID NO: 849 - DNA, 30 bp, Homo Sapien
tcccccttcaagatgccatttggagggtag

SEQ ID NO: 850 - DNA, 30 bp, Homo Sapien
tcctcgcgcccgtgcaggtgacaaataaca

SEQ ID NO: 851 - DNA, 30 bp, Homo Sapien
ccctttgtagcctaagtacgtaaacaaatt

SEQ ID NO: 852 - DNA, 30 bp, Homo Sapien
gtttgcacataggttccactttgggcactg

SEQ ID NO: 853 - DNA, 30 bp, Homo Sapien
tcactgggacagaactttcaagttccttca

SEQ ID NO: 854 - DNA, 30 bp, Homo Sapien
agcggagaaagggtgccagaccattctctg

SEQ ID NO: 855 - DNA, 30 bp, Homo Sapien
ggctgatccaattaacatgtggggttcttg

SEQ ID NO: 856 - DNA, 30 bp, Homo Sapien
caatcaaaaggtttgcaatgatttccttcc

SEQ ID NO: 857 - DNA, 30 bp, Homo Sapien
atatatatcgcgacatcaccggcccgaatc

SEQ ID NO: 858 - DNA, 30 bp, Homo Sapien
cccaatgctttctgatagtaggagataatt

SEQ ID NO: 859 - DNA, 30 bp, Homo Sapien
cagcaccgatcagaactgtaaagctataat

SEQ ID NO: 860 - DNA, 30 bp, Homo Sapien
gacagtcatataaacgtcctgtttctgttt

SEQ ID NO: 861 - DNA, 30 bp, Homo Sapien
ggatgtgctattgtatgattacgaatagtc

SEQ ID NO: 862 - DNA, 30 bp, Homo Sapien
aatgttgtacgtgaagattctaggagggga

SEQ ID NO: 863 - DNA, 30 bp, Homo Sapien
gctctcgtacattgagtacttttattccaa

SEQ ID NO: 864 - DNA, 30 bp, Homo Sapien
gtctaccagttgacccgaatgtgcaccatc

SEQ ID NO: 865 - DNA, 30 bp, Homo Sapien
caaccccatggattaggctgaaacatatga

SEQ ID NO: 866 - DNA, 30 bp, Homo Sapien
cttaattgccacctctaacagcaccaaatc

SEQ ID NO: 867 - DNA, 30 bp, Homo Sapien
gcttgttctaaagctatccattgtgtcata

SEQ ID NO: 868 - DNA, 30 bp, Homo Sapien
ggccctaggggttccactagtgtctgcttt

SEQ ID NO: 869 - DNA, 30 bp, Homo Sapien
cccatacacaagtggatttggccatctttg

SEQ ID NO: 870 - DNA, 30 bp, Homo Sapien
tgttctaaagatattgttccagctagtgga

SEQ ID NO: 871 - DNA, 30 bp, Homo Sapien
tgacgcgtttccgcgtattgtcccctataa

SEQ ID NO: 872 - DNA, 30 bp, Homo Sapien
ctgggagttaggaagtataagtaagccaag

SEQ ID NO: 873 - DNA, 30 bp, Homo Sapien
gcaactagccaaggctagttcctttcaatt

SEQ ID NO: 874 - DNA, 30 bp, Homo Sapien
aaaggataccacagtgcatgctgtttgttc

SEQ ID NO: 875 - DNA, 30 bp, Homo Sapien
ggtgaatgtgtgaaggtcttgcctgaatcc

SEQ ID NO: 876 - DNA, 30 bp, Homo Sapien
actggtcggacaaaatttaacgttgatgta

SEQ ID NO: 877 - DNA, 30 bp, Homo Sapien
gtcacagactggaatacgaaatactacagc

SEQ ID NO: 878 - DNA, 30 bp, Homo Sapien
ggcatttggaaacgggaataaacaaaattg

SEQ ID NO: 879 - DNA, 30 bp, Homo Sapien
ggccaaactgttctggatcaggaaagtcat

SEQ ID NO: 880 - DNA, 30 bp, Homo Sapien
gaaggagaggaatactaattatccattcct

SEQ ID NO: 881 - DNA, 30 bp, Homo Sapien
tcatctgtaagggactaggaaattccaaat

SEQ ID NO: 882 - DNA, 30 bp, Homo Sapien
tcggcacacgctagaagtttatggcagagc

SEQ ID NO: 883 - DNA, 30 bp, Homo Sapien
ggagcagattgctaaagttgatagagaata

SEQ ID NO: 884 - DNA, 30 bp, Homo Sapien
ctgcagatttgtgtagagttctaataccaa

SEQ ID NO: 885 - DNA, 30 bp, Homo Sapien
gtgtcccttccccttatgattttactttcc

SEQ ID NO: 886 - DNA, 30 bp, Homo Sapien
cagtgcaagaccgagattgagggaaagcat

SEQ ID NO: 887 - DNA, 30 bp, Homo Sapien
ttatctccccaactaaaatacaatggggaa

SEQ ID NO: 888 - DNA, 30 bp, Homo Sapien
ttccatgttccggttccatccaaatacact

SEQ ID NO: 889 - DNA, 30 bp, Homo Sapien
ttaagggccggggatggatcttttctaaat

SEQ ID NO: 890 - DNA, 30 bp, Homo Sapien
cagcatattcataactagagccatatcaca

SEQ ID NO: 891 - DNA, 30 bp, Homo Sapien
cagcttacagtcatcacataccccctgaaa

SEQ ID NO: 892 - DNA, 30 bp, Homo Sapien
aggtttgtgccccactacagaacagggcta

SEQ ID NO: 893 - DNA, 30 bp, Homo Sapien
atgatccaactgtgtaatttctggtcagtg

SEQ ID NO: 894 - DNA, 30 bp, Homo Sapien
acatttagtcctgtactgtatggaaacact

SEQ ID NO: 895 - DNA, 30 bp, Homo Sapien
ctcctgtcttgctagacaaggttgctgttg

SEQ ID NO: 896 - DNA, 30 bp, Homo Sapien
tattagtttcctgtaggcgctgtaacaaag

SEQ ID NO: 897 - DNA, 30 bp, Homo Sapien
agcactacggcatgtcgtacctcctggaga

SEQ ID NO: 898 - DNA, 30 bp, Homo Sapien
agaatccatgtagaagtcatggacttttct

SEQ ID NO: 899 - DNA, 30 bp, Homo Sapien
ctcatgtcagtgaccagatttgtggcttat

SEQ ID NO: 900 - DNA, 30 bp, Homo Sapien
gacgctcccttgtcgttcagtatgtcggag

SEQ ID NO: 901 - DNA, 30 bp, Homo Sapien
cctaactcactgtcgctttggagttgaggt

SEQ ID NO: 902 - DNA, 30 bp, Homo Sapien
gtagttgaagtattaatcccaactggctga

SEQ ID NO: 903 - DNA, 30 bp, Homo Sapien
attcctatgaccaaattgcttgcctacagt

SEQ ID NO: 904 - DNA, 30 bp, Homo Sapien
tattacccctatatgcatcaaagctgcaac

SEQ ID NO: 905 - DNA, 30 bp, Homo Sapien
tactgtaacccctgtgaaaaaccttgaaat

SEQ ID NO: 906 - DNA, 30 bp, Homo Sapien
ttggataccagtaattcaaaccttcctcat

SEQ ID NO: 907 - DNA, 30 bp, Homo Sapien
tattgcgaattgcgtcgaacctcccctccc

SEQ ID NO: 908 - DNA, 30 bp, Homo Sapien
ttttacccaattggattggaatgcagaggt

SEQ ID NO: 909 - DNA, 30 bp, Homo Sapien
ttttgtttgctgacgactcctcagaaggct

SEQ ID NO: 910 - DNA, 30 bp, Homo Sapien
caggcatctgtgactgaccgattgatttga

SEQ ID NO: 911 - DNA, 30 bp, Homo Sapien
tccagtctgctaggaccaattaccttgaaa

SEQ ID NO: 912 - DNA, 30 bp, Homo Sapien
tgtacttaaccccaggacctccttactttt

SEQ ID NO: 913 - DNA, 30 bp, Homo Sapien
taggactttgacgtttgaatggtggggggt

SEQ ID NO: 914 - DNA, 30 bp, Homo Sapien
ttggtcagtcactctcagccatagcacttt

SEQ ID NO: 915 - DNA, 30 bp, Homo Sapien
gatcaagatcttaatgaatccctgccacct

SEQ ID NO: 916 - DNA, 30 bp, Homo Sapien
gtggggggtaggttggttgttcagagtctt

SEQ ID NO: 917 - DNA, 30 bp, Homo Sapien
atccgcgcgttggtgcaactgcacaacaac

SEQ ID NO: 918 - DNA, 30 bp, Homo Sapien
aaccacatgaaatgacttatgggggatggt

SEQ ID NO: 919 - DNA, 30 bp, Homo Sapien
ctacatgtgtaagtctgcctaaataggtag

SEQ ID NO: 920 - DNA, 30 bp, Homo Sapien
ttaggacgccaacatgagacctgtaataaa

SEQ ID NO: 921 - DNA, 30 bp, Homo Sapien
gggttgctctagtcagggatgttacagttg

SEQ ID NO: 922 - DNA, 30 bp, Homo Sapien
aattatgctggggtctcgactaaaactgaa

SEQ ID NO: 923 - DNA, 30 bp, Homo Sapien
gaatgtattctgatcggatcgtttatggtt

SEQ ID NO: 924 - DNA, 30 bp, Homo Sapien
atgtctgtgctgtctagtttgtgttcaaaa

SEQ ID NO: 925 - DNA, 30 bp, Homo Sapien
gtgcttttggcatccgttaataataaagcc

SEQ ID NO: 926 - DNA, 30 bp, Homo Sapien
tggagaccctaagggaactccaaaatctga

SEQ ID NO: 927 - DNA, 30 bp, Homo Sapien
ggatgctgggattcttgcctgtatgaatgc

SEQ ID NO: 928 - DNA, 30 bp, Homo Sapien
gattgtgtgaactattcatctggctcttgg

SEQ ID NO: 929 - DNA, 30 bp, Homo Sapien
ttcagtcaaagcaggcaacccccttgtggg

SEQ ID NO: 930 - DNA, 30 bp, Homo Sapien
cagagacatttgctctagtatggtgtattt

SEQ ID NO: 931 - DNA, 30 bp, Homo Sapien
aataactgtcctgtcacatgtgcagcaggc

SEQ ID NO: 932 - DNA, 30 bp, Homo Sapien
gaagcggtgggctaagataggtcctactgc

SEQ ID NO: 933 - DNA, 30 bp, Homo Sapien
ctctgagctgtattgttctttaatggctgt

SEQ ID NO: 934 - DNA, 30 bp, Homo Sapien
ctaaaccttctacgcctttgggccgagcac

SEQ ID NO: 935 - DNA, 30 bp, Homo Sapien
cctcccatgacttgccattataattaaaac

SEQ ID NO: 936 - DNA, 30 bp, Homo Sapien
accggacaccaccagacactaggatgggat

SEQ ID NO: 937 - DNA, 30 bp, Homo Sapien
tgttagggatagtactaagcatttcagttc

SEQ ID NO: 938 - DNA, 30 bp, Homo Sapien
ctgaattcattacaaccctgttatgtcact

SEQ ID NO: 939 - DNA, 30 bp, Homo Sapien
gcagtaaggcagggtcccatttctcactga

SEQ ID NO: 940 - DNA, 30 bp, Homo Sapien
cccatgatcatcatgtcgtccacctccacc

SEQ ID NO: 941 - DNA, 30 bp, Homo Sapien
gcacttatcataagtaaatactccctaacc

SEQ ID NO: 942 - DNA, 30 bp, Homo Sapien
cagtgcctcctttattaaggggttctttga

SEQ ID NO: 943 - DNA, 30 bp, Homo Sapien
tgccaagtgtcagactctaatgagccctca

SEQ ID NO: 944 - DNA, 30 bp, Homo Sapien
tgccttctgtgggcggaaatcaggaagcca

SEQ ID NO: 945 - DNA, 30 bp, Homo Sapien
gagttgacatccctattgactctttcccag

SEQ ID NO: 946 - DNA, 30 bp, Homo Sapien
tacctataccgcaagaggatccaaccatga

SEQ ID NO: 947 - DNA, 30 bp, Homo Sapien
cactgtttcaatgctggtaattgaaaccat

SEQ ID NO: 948 - DNA, 30 bp, Homo Sapien
ctatttggcaaacagcaatgatcttccaat

SEQ ID NO: 949 - DNA, 30 bp, Homo Sapien
caggtgctccggacacccgaaggcaataaa

SEQ ID NO: 950 - DNA, 30 bp, Homo Sapien
gaatgcaactttctaaacagccccaagcaa

SEQ ID NO: 951 - DNA, 30 bp, Homo Sapien
atcacagtagcgctcatggctcgtaggttt

SEQ ID NO: 952 - DNA, 30 bp, Homo Sapien
tagtttacaagtgagacccgatatgtcatt

SEQ ID NO: 953 - DNA, 30 bp, Homo Sapien
tttttgtttgtgaccactaagcttctgtct

SEQ ID NO: 954 - DNA, 30 bp, Homo Sapien
cagcatctggtctactagactttcttacag

SEQ ID NO: 955 - DNA, 30 bp, Homo Sapien
aaggtgattggtacagggtgcctattttag

SEQ ID NO: 956 - DNA, 30 bp, Homo Sapien
gaagaccagaagcacgacagacgagacgag

SEQ ID NO: 957 - DNA, 30 bp, Homo Sapien
acgttcgaggcgggcgccctcattatttgt

SEQ ID NO: 958 - DNA, 30 bp, Homo Sapien
tacagcaagcgagttatcgtcttctgtatt

SEQ ID NO: 959 - DNA, 30 bp, Homo Sapien
tgtccctttgtgtacaaccatgcaaaactg

SEQ ID NO: 960 - DNA, 30 bp, Homo Sapien
gcaagtatctgcctggtactttgatttaaa

SEQ ID NO: 961 - DNA, 30 bp, Homo Sapien
ttaaacatgtaacagttgcagattggctca

SEQ ID NO: 962 - DNA, 30 bp, Homo Sapien
ggcatctgttggactttccacctggtcata

SEQ ID NO: 963 - DNA, 30 bp, Homo Sapien
agcactgcaaggacgacgtgaacagactct

SEQ ID NO: 964 - DNA, 30 bp, Homo Sapien
ggtgaggttgagttatcatgctactaatat

SEQ ID NO: 965 - DNA, 30 bp, Homo Sapien
cttcacctcgatgacgaaaacctaaggagg

SEQ ID NO: 966 - DNA, 30 bp, Homo Sapien
attgaatgttctggttcaaggctccacctc

SEQ ID NO: 967 - DNA, 30 bp, Homo Sapien
ctctttcatctatagtttggccaccataca

SEQ ID NO: 968 - DNA, 30 bp, Homo Sapien
gtgttctagaccccccatattatcccagtg

SEQ ID NO: 969 - DNA, 30 bp, Homo Sapien
aatattgtccccccctaccttaagaagata

SEQ ID NO: 970 - DNA, 30 bp, Homo Sapien
aatggggcacatttggcactagcttgagcc

SEQ ID NO: 971 - DNA, 30 bp, Homo Sapien
cacaaacccatatgtatcctttcctcaacc

SEQ ID NO: 972 - DNA, 30 bp, Homo Sapien
ggtattgtgtatatgggcgggacgtgtgtg

SEQ ID NO: 973 - DNA, 30 bp, Homo Sapien
ctgtctctcccaacgtgactatgaattccc

SEQ ID NO: 974 - DNA, 30 bp, Homo Sapien
cttacctactcccgtctagaaaatgctgaa

SEQ ID NO: 975 - DNA, 30 bp, Homo Sapien
ttatcttgttacaaaaactgagatgtgggg

SEQ ID NO: 976 - DNA, 30 bp, Homo Sapien
gatataggcatcgcacctctatcatcgtca

SEQ ID NO: 977 - DNA, 30 bp, Homo Sapien
tgtcagtgaacaagggcgtcactctgggag

SEQ ID NO: 978 - DNA, 30 bp, Homo Sapien
taatgaaggcactgcttatttgtagtcacc

SEQ ID NO: 979 - DNA, 30 bp, Homo Sapien
acaagaccgtgtaggtgtcccttcagagag

SEQ ID NO: 980 - DNA, 30 bp, Homo Sapien
caggatgtcactcaatcagtttgggtttgc

SEQ ID NO: 981 - DNA, 30 bp, Homo Sapien
catgcctttcaattctgagtgggaggaaaa

SEQ ID NO: 982 - DNA, 30 bp, Homo Sapien
taccttccggtagccctagacttggggtca

SEQ ID NO: 983 - DNA, 30 bp, Homo Sapien
gacattgagaattggtacctacaacagtct

SEQ ID NO: 984 - DNA, 30 bp, Homo Sapien
gatcacttcagtgacaatacccattaatga

SEQ ID NO: 985 - DNA, 30 bp, Homo Sapien
cacacctcttcctcgacaatcacaaattac

SEQ ID NO: 986 - DNA, 30 bp, Homo Sapien
agtataatattgggaccccataccgttagc

SEQ ID NO: 987 - DNA, 30 bp, Homo Sapien
tgtttagatttccacgttacacaaacacac

SEQ ID NO: 988 - DNA, 30 bp, Homo Sapien
gtgtcttgcagaatcttggatcattaaaga

SEQ ID NO: 989 - DNA, 30 bp, Homo Sapien
ccagttcaccggacagtgattaaaactatg

SEQ ID NO: 990 - DNA, 30 bp, Homo Sapien
gtttatacgaattgccattaaacatcgctg

SEQ ID NO: 991 - DNA, 30 bp, Homo Sapien
ttgttgtaaatcccaatctttactgccatg

SEQ ID NO: 992 - DNA, 30 bp, Homo Sapien
taatgcttttagctgctcgcatgcttgtct

SEQ ID NO: 993 - DNA, 30 bp, Homo Sapien
ggattcctttttaccgtgtcacatttactt

SEQ ID NO: 994 - DNA, 30 bp, Homo Sapien
tgggggcagaccagagagctcaagtttcag

SEQ ID NO: 995 - DNA, 30 bp, Homo Sapien
tatggactaccacagcgaataggaatgcaa

SEQ ID NO: 996 - DNA, 30 bp, Homo Sapien
ccaacaggagagatctagttttctcaaggt

SEQ ID NO: 997 - DNA, 30 bp, Homo Sapien
ctttattccatttgaaagtgtcaagcccat

SEQ ID NO: 998 - DNA, 30 bp, Homo Sapien
gctggtacagtacactaaaagactttgata

SEQ ID NO: 999 - DNA, 30 bp, Homo Sapien
tacgaattttttggtgcatagcatctcagc

SEQ ID NO: 1000 - DNA, 30 bp, Homo Sapien
gtgtgtaatatttgcgtatggtgttcctct

SEQ ID NO: 1001 - DNA, 30 bp, Homo Sapien
ctaagcataagtgaaagacacctcccctca

SEQ ID NO: 1002 - DNA, 30 bp, Homo Sapien
ccttacccacacctatccttttgaggggct

SEQ ID NO: 1003 - DNA, 30 bp, Homo Sapien
tgaggtaacttccacgtagccccttgccac

SEQ ID NO: 1004 - DNA, 30 bp, Homo Sapien
atcggcggagccttcttgtgtaatgtaaac

SEQ ID NO: 1005 - DNA, 30 bp, Homo Sapien
gtacctgttgttctacgagtcaagagcagt

SEQ ID NO: 1006 - DNA, 30 bp, Homo Sapien
tgagagaatacttgttgatttctgatgtgc

SEQ ID NO: 1007 - DNA, 30 bp, Homo Sapien
agatgccggagactcgcccttcaataaaaa

SEQ ID NO: 1008 - DNA, 30 bp, Homo Sapien
ttacaactgcatgagcttcctctcgcacaa

SEQ ID NO: 1009 - DNA, 30 bp, Homo Sapien
gtctgaggttacaattagaactcctgaccc

SEQ ID NO: 1010 - DNA, 30 bp, Homo Sapien
taaactacaattgtttggcaccctctcttc

SEQ ID NO: 1011 - DNA, 30 bp, Homo Sapien
cgcgctgttgccactgttacaggcagaaac

SEQ ID NO: 1012 - DNA, 30 bp, Homo Sapien
acaccatcctccattcgacccattgacttc

SEQ ID NO: 1013 - DNA, 30 bp, Homo Sapien
aactcagttaacaagttaaggaccgaagtg

SEQ ID NO: 1014 - DNA, 30 bp, Homo Sapien
ggtctgtacattgactgattcactttttca

SEQ ID NO: 1015 - DNA, 30 bp, Homo Sapien
ggatgtaataggtcaggtatttggtttact

SEQ ID NO: 1016 - DNA, 30 bp, Homo Sapien
atgagctaagtgtcatgcatatttgtgaag

SEQ ID NO: 1017 - DNA, 30 bp, Homo Sapien
gaaagaccccaatttaagccttgcttattt

SEQ ID NO: 1018 - DNA, 30 bp, Homo Sapien
ctggtgatggattaacatatagcctttgtt

SEQ ID NO: 1019 - DNA, 30 bp, Homo Sapien
gtatcccccccatattgtgatgatgcaatc

SEQ ID NO: 1020 - DNA, 30 bp, Homo Sapien
agaacactcggaggggcgggaatcagaaga

SEQ ID NO: 1021 - DNA, 30 bp, Homo Sapien
actatgtgtggaacaacccagtaatatcag

SEQ ID NO: 1022 - DNA, 30 bp, Homo Sapien
tggagaacagaagatagcaggctgtgtatt

SEQ ID NO: 1023 - DNA, 30 bp, Homo Sapien
atgccagtgagggacgtcagacttggctca

SEQ ID NO: 1024 - DNA, 30 bp, Homo Sapien
cgttcacaacattctcttaagttctaacag

SEQ ID NO: 1025 - DNA, 30 bp, Homo Sapien
cagacagaagcttgactgggtcttcaatga

SEQ ID NO: 1026 - DNA, 30 bp, Homo Sapien
ttagtacccgggccagttgagactgaaaca

SEQ ID NO: 1027 - DNA, 30 bp, Homo Sapien
ttcaagacttaagccagattgggttttgag

SEQ ID NO: 1028 - DNA, 30 bp, Homo Sapien
agggagtcccttttgatgggaagtgcagtc

SEQ ID NO: 1029 - DNA, 30 bp, Homo Sapien
atgcttttagtctcttgtaactggggagaa

SEQ ID NO: 1030 - DNA, 30 bp, Homo Sapien
caatgacataacagagcacgcatcagaaga

SEQ ID NO: 1031 - DNA, 30 bp, Homo Sapien
acatccaacaggcgccaaactcacagagcc

SEQ ID NO: 1032 - DNA, 30 bp, Homo Sapien
gcgtggaaaaagacgatgtttatgttctta

SEQ ID NO: 1033 - DNA, 30 bp, Homo Sapien
ttatgtcgatgccctgtagtttgaaagtga

SEQ ID NO: 1034 - DNA, 30 bp, Homo Sapien
gaaggggaaagggcgttaaagtgatacatt

SEQ ID NO: 1035 - DNA, 30 bp, Homo Sapien
gctgtactaacgaccaccaagacgccacca

SEQ ID NO: 1036 - DNA, 30 bp, Homo Sapien
ggcagaatataaacgacgcaccttcttccc

SEQ ID NO: 1037 - DNA, 30 bp, Homo Sapien
agtaagctgtgaggctattctggctcccca

SEQ ID NO: 1038 - DNA, 30 bp, Homo Sapien
ctttcaggtcctgcatactgatgaaactac

SEQ ID NO: 1039 - DNA, 30 bp, Homo Sapien
cccatgtcagtttctattgcattgagagcc

SEQ ID NO: 1040 - DNA, 30 bp, Homo Sapien
cgagacatgaatactatccatgtaataagc

SEQ ID NO: 1041 - DNA, 30 bp, Homo Sapien
cctaactataattattgggccagatacttg

SEQ ID NO: 1042 - DNA, 30 bp, Homo Sapien
ccttgtttctagcctccttccttgcagtgt

SEQ ID NO: 1043 - DNA, 30 bp, Homo Sapien
aagcactgggaagtaatggggtgtggggtg

SEQ ID NO: 1044 - DNA, 30 bp, Homo Sapien
aatagttgacagatctaactttcctagtgg

SEQ ID NO: 1045 - DNA, 30 bp, Homo Sapien
cagatagttataggccactgttttgtaatg

SEQ ID NO: 1046 - DNA, 30 bp, Homo Sapien
gcttaataatgggcgataatgtcaagtgat

SEQ ID NO: 1047 - DNA, 30 bp, Homo Sapien
gcgaagacctgacgagagactgtaaaggaa

SEQ ID NO: 1048 - DNA, 30 bp, Homo Sapien
ccctgactgcgtgaaatgttcagggaggtc

SEQ ID NO: 1049 - DNA, 30 bp, Homo Sapien
aactagcactaaccctaagagggccgggag

SEQ ID NO: 1050 - DNA, 30 bp, Homo Sapien
cttcttgtcagacataaagccatgtttcct

SEQ ID NO: 1051 - DNA, 30 bp, Homo Sapien
acagagcacaacaaaggacgagcagcgcca

SEQ ID NO: 1052 - DNA, 30 bp, Homo Sapien
gccgggcgcctgtattatactttgtacttt

SEQ ID NO: 1053 - DNA, 30 bp, Homo Sapien
ctaccattaaggtgaaatcatggatcagat

SEQ ID NO: 1054 - DNA, 30 bp, Homo Sapien
tgatcctatagctattgcatctctctcctt

SEQ ID NO: 1055 - DNA, 30 bp, Homo Sapien
acttgtacgcctcccgtgagaccactctgt

SEQ ID NO: 1056 - DNA, 30 bp, Homo Sapien
agtgctgatgtagcatgcttgttgcaattg

SEQ ID NO: 1057 - DNA, 30 bp, Homo Sapien
ttatcgcgcgtctatatggccccgatcacc

SEQ ID NO: 1058 - DNA, 30 bp, Homo Sapien
cctctcttcgcttcacttggactgaccctg

SEQ ID NO: 1059 - DNA, 30 bp, Homo Sapien
tagtgtgtggcatgtatgtgcagactcttg

SEQ ID NO: 1060 - DNA, 30 bp, Homo Sapien
cacatacaattacgtaccatatacagtgct

SEQ ID NO: 1061 - DNA, 30 bp, Homo Sapien
agtgcaaagcaatgaaacgtccaatggtta

SEQ ID NO: 1062 - DNA, 30 bp, Homo Sapien
gaatggcttggtcaactgtgttcagttcat

SEQ ID NO: 1063 - DNA, 30 bp, Homo Sapien
tcaaatgtagtgtgtttccctaactttctg

SEQ ID NO: 1064 - DNA, 30 bp, Homo Sapien
ctgacatgcctagactcctaataaaggtat

SEQ ID NO: 1065 - DNA, 30 bp, Homo Sapien
tgcacatgaatcatgagtcccttctccact

SEQ ID NO: 1066 - DNA, 30 bp, Homo Sapien
tgcttggcgtgggggatggcttaactgtac

SEQ ID NO: 1067 - DNA, 30 bp, Homo Sapien
atctgttcataccgcatgacaccgtccact

SEQ ID NO: 1068 - DNA, 30 bp, Homo Sapien
ctggtttgcctttcagtttgttgaaatgta

SEQ ID NO: 1069 - DNA, 30 bp, Homo Sapien
ggagttacctgatcacatcgagagagtgct

SEQ ID NO: 1070 - DNA, 30 bp, Homo Sapien
tgatggatcttaggttgcctgaaggcacgt

SEQ ID NO: 1071 - DNA, 30 bp, Homo Sapien
gctccttctggggttatcgtatgtacaaag

SEQ ID NO: 1072 - DNA, 30 bp, Homo Sapien
taacaacagctcacagccaaatagagcaat

SEQ ID NO: 1073 - DNA, 30 bp, Homo Sapien
tagtcatctatccgttcttcacttagcagg

SEQ ID NO: 1074 - DNA, 30 bp, Homo Sapien
ggatttcagttccccgcgtcctcattaaat

SEQ ID NO: 1075 - DNA, 30 bp, Homo Sapien
gggaagtaccttcattgggttgttctgaaa

SEQ ID NO: 1076 - DNA, 30 bp, Homo Sapien
agccatgggcctatgagcggtctaactgtg

SEQ ID NO: 1077 - DNA, 30 bp, Homo Sapien
gcatattcctgactaaacgtagtaaggaaa

SEQ ID NO: 1078 - DNA, 30 bp, Homo Sapien
aaggcaaagacacgtaaatctctgccaaca

SEQ ID NO: 1079 - DNA, 30 bp, Homo Sapien
tgagttatttaagaggccagttttcaggac

SEQ ID NO: 1080 - DNA, 30 bp, Homo Sapien
gctctggtattaatgaatctagtgcctttt

SEQ ID NO: 1081 - DNA, 30 bp, Homo Sapien
aatgggtcaggagttgtattggcaagaggg

SEQ ID NO: 1082 - DNA, 30 bp, Homo Sapien
ttagtttcagtgttccctatccctcattct

SEQ ID NO: 1083 - DNA, 30 bp, Homo Sapien
gggtgatttaagtgagtcacaagtcacaaa

SEQ ID NO: 1084 - DNA, 30 bp, Homo Sapien
acttctatctgttcttttttgaggctcagg

SEQ ID NO: 1085 - DNA, 30 bp, Homo Sapien
gaggagggctgtaacgccttcagtcagtct

SEQ ID NO: 1086 - DNA, 30 bp, Homo Sapien
agacagcgacgatgatagtggctccggaag

SEQ ID NO: 1087 - DNA, 30 bp, Homo Sapien
tggtctttgtaagagtgtagaagcattcct

SEQ ID NO: 1088 - DNA, 30 bp, Homo Sapien
gaaaagttgaagcgaatggaagtatcagaa

SEQ ID NO: 1089 - DNA, 30 bp, Homo Sapien
gtaaaagtctaccaccgaatccctagtccc

SEQ ID NO: 1090 - DNA, 30 bp, Homo Sapien
tgagggctagacgtgtgctctgaagaatgg

SEQ ID NO: 1091 - DNA, 30 bp, Homo Sapien
attccgtagggtcttgttcccacgaccgga

SEQ ID NO: 1092 - DNA, 30 bp, Homo Sapien
ggtaatttgacaccctgttaataacgcaat

SEQ ID NO: 1093 - DNA, 30 bp, Homo Sapien
atagcacatttccaactaataacaccccct

SEQ ID NO: 1094 - DNA, 30 bp, Homo Sapien
atacccaaatacgcaccgaataaactcttt

SEQ ID NO: 1095 - DNA, 30 bp, Homo Sapien
ggacatcgaagagaatttaacttagcagtt

SEQ ID NO: 1096 - DNA, 30 bp, Homo Sapien
gttgtatttcgtcttatgtctcgagttcct

SEQ ID NO: 1097 - DNA, 30 bp, Homo Sapien
tggccttatttttccaatcccagagcccac

SEQ ID NO: 1098 - DNA, 30 bp, Homo Sapien
atcgagcccatgtacttgccgcctgatgac

SEQ ID NO: 1099 - DNA, 30 bp, Homo Sapien
ggtggtgtagattgtatgagtaagaagtat

SEQ ID NO: 1100 - DNA, 30 bp, Homo Sapien
caagctctgccctaggcttgttactttata

SEQ ID NO: 1101 - DNA, 30 bp, Homo Sapien
caacactttgttcgctcattttacgctgtc

SEQ ID NO: 1102 - DNA, 30 bp, Homo Sapien
tgttctctgggggaatttcatttgcatcta

SEQ ID NO: 1103 - DNA, 30 bp, Homo Sapien
agtttgagatactaggttttatcacctgct

SEQ ID NO: 1104 - DNA, 30 bp, Homo Sapien
aacttgtccatgtgccaagagggtggcgca

SEQ ID NO: 1105 - DNA, 30 bp, Homo Sapien
gataaccatttctatcctgttccaaagtct

SEQ ID NO: 1106 - DNA, 30 bp, Homo Sapien
aggaacagcgggaagtactcgctgcagttc

SEQ ID NO: 1107 - DNA, 30 bp, Homo Sapien
ccttgaactgagagcctgtatctggattta

SEQ ID NO: 1108 - DNA, 30 bp, Homo Sapien
accgccattgggctactgtagatttgtatc

SEQ ID NO: 1109 - DNA, 30 bp, Homo Sapien
tccttcactttagtggtctaatcaacagat

SEQ ID NO: 1110 - DNA, 30 bp, Homo Sapien
actacaccattggtttccaatactgcacac

SEQ ID NO: 1111 - DNA, 30 bp, Homo Sapien
cacagcaaaccacacttaacctatctataa

SEQ ID NO: 1112 - DNA, 30 bp, Homo Sapien
ccaggcgatctgcatactttaaggaccaga

SEQ ID NO: 1113 - DNA, 30 bp, Homo Sapien
gatttctagaactccctctttgcatagtgc

SEQ ID NO: 1114 - DNA, 30 bp, Homo Sapien
catcctcactgtggagtaatgagggggagg

SEQ ID NO: 1115 - DNA, 30 bp, Homo Sapien
gctgcctgtgtctatggggttctgtcttct

SEQ ID NO: 1116 - DNA, 30 bp, Homo Sapien
tcaaccctcactaaactttgccggttcaga

SEQ ID NO: 1117 - DNA, 30 bp, Homo Sapien
tccaccgagtctgtgtcaccacctgcttca

SEQ ID NO: 1118 - DNA, 30 bp, Homo Sapien
tgggatgttgctgggttaccatatttccat

SEQ ID NO: 1119 - DNA, 30 bp, Homo Sapien
aggggggcatgaataaaggctacaggctcc

SEQ ID NO: 1120 - DNA, 30 bp, Homo Sapien
ctttttagtgtggctttagtatggcttcct

SEQ ID NO: 1121 - DNA, 30 bp, Homo Sapien
agaaggcaggtgagcaaccagttggctagg

SEQ ID NO: 1122 - DNA, 30 bp, Homo Sapien
gccccgtggtgaggccatgttctcataatc

SEQ ID NO: 1123 - DNA, 30 bp, Homo Sapien
atatcacttccatgacataagtgctattgc

SEQ ID NO: 1124 - DNA, 30 bp, Homo Sapien
agatcccaggtctctccgtggtatgtttgt

SEQ ID NO: 1125 - DNA, 30 bp, Homo Sapien
gtgattcacttattcgccctccctactttg

SEQ ID NO: 1126 - DNA, 30 bp, Homo Sapien
atatagaattgggaactgatacatgtgtcc

SEQ ID NO: 1127 - DNA, 30 bp, Homo Sapien
gtggagtggaatgttctatccccacaagaa

SEQ ID NO: 1128 - DNA, 30 bp, Homo Sapien
tcaggagcgtcaatgtgcttgtacatagag

SEQ ID NO: 1129 - DNA, 30 bp, Homo Sapien
gctttttgtagctggttgaaaattcaggaa

SEQ ID NO: 1130 - DNA, 30 bp, Homo Sapien
ctcaaggcgggttaaacggttactcaaaag

SEQ ID NO: 1131 - DNA, 30 bp, Homo Sapien
tgcgggacagtcagtaggatcattttcata

SEQ ID NO: 1132 - DNA, 30 bp, Homo Sapien
ataatacaggaacaggtatagatgtagcct

SEQ ID NO: 1133 - DNA, 30 bp, Homo Sapien
taactgaagtgtctgtacggaatgcccttt

SEQ ID NO: 1134 - DNA, 30 bp, Homo Sapien
gaaatgtagaacagagtgcttgcaaaatgt

SEQ ID NO: 1135 - DNA, 30 bp, Homo Sapien
gttttcaccatagcctacgttaacccattt

SEQ ID NO: 1136 - DNA, 30 bp, Homo Sapien
aacactgcgctaaagcggggatgttccatt

SEQ ID NO: 1137 - DNA, 30 bp, Homo Sapien
ctaatggagatagctttacactttctgctt

SEQ ID NO: 1138 - DNA, 30 bp, Homo Sapien
cataggatccaactggacaacgtgtgggat

SEQ ID NO: 1139 - DNA, 30 bp, Homo Sapien
tattacatggtacctgagttctgcttcctt

SEQ ID NO: 1140 - DNA, 30 bp, Homo Sapien
attttagtcccagccttgcagcttacacac

SEQ ID NO: 1141 - DNA, 30 bp, Homo Sapien
cattgtgagtggaagtagttatctggaata

SEQ ID NO: 1142 - DNA, 30 bp, Homo Sapien
ttgagtttgtttgcagttccctcagcttgc

SEQ ID NO: 1143 - DNA, 30 bp, Homo Sapien
ctcccacgtctatgttcacatttgtggtcc

SEQ ID NO: 1144 - DNA, 30 bp, Homo Sapien
aaagaatgtgctttgattcgaagggtctta

SEQ ID NO: 1145 - DNA, 30 bp, Homo Sapien
cgtgggacatctagtaggtgcttgacataa

SEQ ID NO: 1146 - DNA, 30 bp, Homo Sapien
catctaacgtttcagtgtatccttacagaa

SEQ ID NO: 1147 - DNA, 30 bp, Homo Sapien
atatgccacaacgcaccacgaccttcccag

SEQ ID NO: 1148 - DNA, 30 bp, Homo Sapien
ggcggtggggtctagattccacatttatgt

SEQ ID NO: 1149 - DNA, 30 bp, Homo Sapien
atacttgcatggaaactgactacacataca

SEQ ID NO: 1150 - DNA, 30 bp, Homo Sapien
gaacattccaacagcagaatacatgttctt

SEQ ID NO: 1151 - DNA, 30 bp, Homo Sapien
gatgggatttcacctaattttaatgtggct

SEQ ID NO: 1152 - DNA, 30 bp, Homo Sapien
tctccttcgtgtgttcacctctcccccaga

SEQ ID NO: 1153 - DNA, 30 bp, Homo Sapien
agaggcaactttgcggtccatcacgcaatc

SEQ ID NO: 1154 - DNA, 50 bp, Homo Sapien
atgaagttgagagcgtcacagggatgcttaacgaggccgaggggaaggcc

SEQ ID NO: 1155 - DNA, 50 bp, Homo Sapien
ttttagtccaaataacaagtaccaaagttttatcaagtttgggtctgtgc

SEQ ID NO: 1156 - DNA, 50 bp, Homo Sapien
ttaggagtcaaatagtctctgcatggtggggaggatcatgatggaatatg

SEQ ID NO: 1157 - DNA, 50 bp, Homo Sapien
cacgtgcggcggtgtctaagtggtgttaccagtgtacgcgcagtgacctt

SEQ ID NO: 1158 - DNA, 50 bp, Homo Sapien
actgagggcggggatactgattcagaaaccctgtagcgtgtaataaaaga

SEQ ID NO: 1159 - DNA, 50 bp, Homo Sapien
aagcttagctggtcatatttctacttgcttccttttagcttctgccttgc

SEQ ID NO: 1160 - DNA, 50 bp, Homo Sapien
gctggactgcattcacacatggcatgaaataagtcaggttctttacaaat

SEQ ID NO: 1161 - DNA, 50 bp, Homo Sapien
atgagatttctatcgtacagggcaagcctacattgtggacatattctaga

SEQ ID NO: 1162 - DNA, 50 bp, Homo Sapien
ataatatgcacacagtgctttccgtggcactgcatacaatctgaggcctc

SEQ ID NO: 1163 - DNA, 50 bp, Homo Sapien
gcacccctagctcttgggatgtttgtatccaactccgggcaatgtggggc

SEQ ID NO: 1164 - DNA, 50 bp, Homo Sapien
tgggttctgatgggaatatatacactcatctggactaggccaatggaagc

SEQ ID NO: 1165 - DNA, 50 bp, Homo Sapien
atttagctgcataaaacgttcggctcatttatctgacatcttagtcacat

SEQ ID NO: 1166 - DNA, 50 bp, Homo Sapien
tttttgggccttaggcgtttcgttcatcctgctaaggggatgaagcaaac

SEQ ID NO: 1167 - DNA, 50 bp, Homo Sapien
caaatgcatcaattataccagggatgtatagtaagtcagggaactaatat

SEQ ID NO: 1168 - DNA, 50 bp, Homo Sapien
cctttccatgctacacaagcaagaaatgcctataaagacagacttgagtg

SEQ ID NO: 1169 - DNA, 50 bp, Homo Sapien
gaaatatgcacaatcgcggtgtacgaggagcatacgccacacttatgatt

SEQ ID NO: 1170 - DNA, 50 bp, Homo Sapien
tcccgtgatttagcagcattgcatgagatttgcgtggctcattcagatga

SEQ ID NO: 1171 - DNA, 50 bp, Homo Sapien
catcaagtttattcggtagtttgaccgctagtatgttggaagttatttgg

SEQ ID NO: 1172 - DNA, 50 bp, Homo Sapien
cagcaccaatcccgcattcagaacctcccagtgaaagggcagccttcatt

SEQ ID NO: 1173 - DNA, 50 bp, Homo Sapien
aatgtgtccaaaaggttggatggcaaggtttgggtgctactgccttggca

SEQ ID NO: 1174 - DNA, 50 bp, Homo Sapien
tatatgtacagtttcacatatgtataaaaacagtagtttgggggcctctt

SEQ ID NO: 1175 - DNA, 50 bp, Homo Sapien
aaaggccctaaatttaagatgccagacatgcacttcaaggcccccaagat

SEQ ID NO: 1176 - DNA, 50 bp, Homo Sapien
aagcagcctagcacagactaagcattgagcataataggcccacataattt

SEQ ID NO: 1177 - DNA, 50 bp, Homo Sapien
ttcgtgagctcgtctctgatctcgcgcaagagtgacacacaggtgttcaa

SEQ ID NO: 1178 - DNA, 50 bp, Homo Sapien
atttccagtccggtggtccccaccggaagtcctgatgtatagcaagttca

SEQ ID NO: 1179 - DNA, 50 bp, Homo Sapien
cagaggtagaacgcatatcgacgtagacttatcgttacaactaattagaa

SEQ ID NO: 1180 - DNA, 50 bp, Homo Sapien
tcagcctatgctgctccgagtggttggcagtcaaacttcggactccatgg

SEQ ID NO: 1181 - DNA, 50 bp, Homo Sapien
atacagtggatctcaatcttcggggtgtgatgaatagcgaatcatctcaa

SEQ ID NO: 1182 - DNA, 50 bp, Homo Sapien
tcgtgcctataaatagtaggaccaatgttgtgattaacatcatcaggctt

SEQ ID NO: 1183 - DNA, 50 bp, Homo Sapien
gtggaaatgcgtgtcacggccccgtcttaccgctagttccctgcatagca

SEQ ID NO: 1184 - DNA, 50 bp, Homo Sapien
ggaatgcacagttgacttgggaagcagtattactagatctggaggcaacc

SEQ ID NO: 1185 - DNA, 50 bp, Homo Sapien
tgctccctccgtctctaccaggaatggccttgtcctatggaaggcactgc

SEQ ID NO: 1186 - DNA, 50 bp, Homo Sapien
taatatatcggatacaggccctaagtctatgttccgatcaacaatctcat

SEQ ID NO: 1187 - DNA, 50 bp, Homo Sapien
cccttggagccacaaatgtttagaactcttcaacttcggtaatgaggaag

SEQ ID NO: 1188 - DNA, 50 bp, Homo Sapien
gtataactgtgagtcttggagccatagtaatgtttctcatgccccccaaa

SEQ ID NO: 1189 - DNA, 50 bp, Homo Sapien
ttatccttttctggagagtagtctagaccaagccaattgcagaaccacat

SEQ ID NO: 1190 - DNA, 50 bp, Homo Sapien
catacctgcccgctgtagatgagaaactcagggacttgtacagcaaaagc

SEQ ID NO: 1191 - DNA, 50 bp, Homo Sapien
aagaatctgtacctgtcctgcgtgttgaaagatgataagcccactctaca

SEQ ID NO: 1192 - DNA, 50 bp, Homo Sapien
ccttttgctcttaagttgtggagagtgcaacagtagcataggaccctacc

SEQ ID NO: 1193 - DNA, 50 bp, Homo Sapien
ctattaaaacagccaaaactccacagtcaatattagtaatttcttgctgg

SEQ ID NO: 1194 - DNA, 50 bp, Homo Sapien
ttatttcacttgagtccggagatgcaagtattcatgatacagtagaaaat

SEQ ID NO: 1195 - DNA, 50 bp, Homo Sapien
gagcccagctatgaactccttctccacaagcgccttcggtccagttgcct

SEQ ID NO: 1196 - DNA, 50 bp, Homo Sapien
tagtgacgctgcggacaggggaagtgaagtggtctgtaggtgagcaccca

SEQ ID NO: 1197 - DNA, 50 bp, Homo Sapien
gctgctgtacatcaggcgcgggatggggagataactgcgaaatcttcccc

SEQ ID NO: 1198 - DNA, 50 bp, Homo Sapien
atggcaaatgaccagcagattcaaatctatggtggtttgacctttagaga

SEQ ID NO: 1199 - DNA, 50 bp, Homo Sapien
gtagcctcgccgtctgtgaattggaccatcctatttaactggcttcagcc

SEQ ID NO: 1200 - DNA, 50 bp, Homo Sapien
aatgacctcagtcccacgacagtgatgtccgagggcgcccggaacattgt

SEQ ID NO: 1201 - DNA, 50 bp, Homo Sapien
cttgcccctaggaaggtgaatctgccctagcctggtttacggtttcttat

SEQ ID NO: 1202 - DNA, 50 bp, Homo Sapien
cttaagtataaaccttatgaactacagtggagctacactcattgaaatgt

SEQ ID NO: 1203 - DNA, 50 bp, Homo Sapien
aatctcaggatggacgcacctccgatgaattcctctgacattctgccagg

SEQ ID NO: 1204 - DNA, 50 bp, Homo Sapien
gaaatagccaccgtctacagatggcttagttaagtcatccacagcccaag

SEQ ID NO: 1205 - DNA, 50 bp, Homo Sapien
tcagcgtcacataaaaagagcatgtaggatgggacatattgggatgtatt

SEQ ID NO: 1206 - DNA, 50 bp, Homo Sapien
atacatggttttccgatccatgctcagacaggatgtgagttggtttgatg

SEQ ID NO: 1207 - DNA, 50 bp, Homo Sapien
gttatattgataaccatgctcagcaatgagctattagattcattttggga

SEQ ID NO: 1208 - DNA, 50 bp, Homo Sapien
tgtccttaagcacaacagtcataccagcacaacgcaatgcttatgtcctg

SEQ ID NO: 1209 - DNA, 50 bp, Homo Sapien
ggaagacatttcaacctacgaatgaagagggacacttcccttttcagtga

SEQ ID NO: 1210 - DNA, 50 bp, Homo Sapien
tatagtcccagatgtatctcccttaatcatggaataaagagaggtggcaa

SEQ ID NO: 1211 - DNA, 50 bp, Homo Sapien
agagtataatggaagatagcacgatcttgtcagattggacaaacagcaac

SEQ ID NO: 1212 - DNA, 50 bp, Homo Sapien
tgctttcctcaaacaggatactgcctgctgtaagaccatcctctatggtt

SEQ ID NO: 1213 - DNA, 50 bp, Homo Sapien
ttattgcctctttcacattgaaacccaggagtggataacactggcttcag

SEQ ID NO: 1214 - DNA, 50 bp, Homo Sapien
tatggtatacttgctgcttcggccttgtatcatttctcgtcatctgaatt

SEQ ID NO: 1215 - DNA, 50 bp, Homo Sapien
acctgaattcccaccgcagagagtgttgtggccgtgaggacttttctgtc

SEQ ID NO: 1216 - DNA, 50 bp, Homo Sapien
ttttagactcgttgagtttcttgggcactcccaagggcgttggggtcata

SEQ ID NO: 1217 - DNA, 50 bp, Homo Sapien
gggataacatttggaggaaggtgggaagcagatgactgaggaagggatgg

SEQ ID NO: 1218 - DNA, 50 bp, Homo Sapien
cagctttgcaccagcgtggcggtgtttactggcggccttgatctatgcca

SEQ ID NO: 1219 - DNA, 50 bp, Homo Sapien
ggcttgactggatggaaggagacttaggaacctaccagttggccatgatg

SEQ ID NO: 1220 - DNA, 50 bp, Homo Sapien
actgacttgtctaattcgtagggatgtgaggttctgctgaggaaatgggt

SEQ ID NO: 1221 - DNA, 50 bp, Homo Sapien
ggtgtagacgttcctcttgggaccgggatttcatctggtgtgatagacac

SEQ ID NO: 1222 - DNA, 50 bp, Homo Sapien
catgaggtatctaaggatttagaccagaggtctagattaatactctattt

SEQ ID NO: 1223 - DNA, 50 bp, Homo Sapien
tctgcccctagtgtgtgttgcgtgtccgctccacggcgtacatgttgctt

SEQ ID NO: 1224 - DNA, 50 bp, Homo Sapien
tggttagctggttaggaccagtaactggattgcgaccactatgataatat

SEQ ID NO: 1225 - DNA, 50 bp, Homo Sapien
tgtttgtctcatcccattctgcgtcatgcttgtgttataactactccgga

SEQ ID NO: 1226 - DNA, 50 bp, Homo Sapien
cctgttgacacaggtctttcctaaggctgcaaggtttaggctggtggccc

SEQ ID NO: 1227 - DNA, 50 bp, Homo Sapien
agatgatggaaggtgtggtgactaagggccacggttattgggtgaaattt

SEQ ID NO: 1228 - DNA, 50 bp, Homo Sapien
acacctgactctgaaatctgaagacctcgagcagatgatgccaacctctg

SEQ ID NO: 1229 - DNA, 50 bp, Homo Sapien
ttggaagtgaggcattgcacggggagacgtacgtatcagcggccccttga

SEQ ID NO: 1230 - DNA, 50 bp, Homo Sapien
gttcctttcatcacaacaaacgttatggagattatgcgataccaggcact

SEQ ID NO: 1231 - DNA, 50 bp, Homo Sapien
gatgtggcaaatctctattaggaaatattctgtaatcttcagacctagaa

SEQ ID NO: 1232 - DNA, 50 bp, Homo Sapien
agttgactgatgatacacaacgcactaggacttatgctcaaagctcaaaa

SEQ ID NO: 1233 - DNA, 50 bp, Homo Sapien
gatcatgtcgcacaaacaaatttactattcggacaaatacgacgacgagg

SEQ ID NO: 1234 - DNA, 50 bp, Homo Sapien
cagctaaacactcctgcggtcgtatggtcgacaacaatcacacataaaat

SEQ ID NO: 1235 - DNA, 50 bp, Homo Sapien
acttaaagcttagcttatgtccaaggtaagtattttagcatggctgtcaa

SEQ ID NO: 1236 - DNA, 50 bp, Homo Sapien
ctgaaggaatagggcggctttccttccagcgagcatcattcggctgttac

SEQ ID NO: 1237 - DNA, 50 bp, Homo Sapien
accctcatcgggctgtcgcctgacagcatacctcaaaaggccctagctaa

SEQ ID NO: 1238 - DNA, 50 bp, Homo Sapien
cttcttaccttcttgattgtcattaccttatacgtgatatcaaaacacag

SEQ ID NO: 1239 - DNA, 50 bp, Homo Sapien
tttatgtttgtagttggaaagcaaagctaggtagccatttcttctgttct

SEQ ID NO: 1240 - DNA, 50 bp, Homo Sapien
gccagcccgaattcccgttctcctgtgtctactaacaaggacatgggggt

SEQ ID NO: 1241 - DNA, 50 bp, Homo Sapien
gacattccactttcctaggttataggaaagatctgtttatgtagtttgtt

SEQ ID NO: 1242 - DNA, 50 bp, Homo Sapien
aatatccttgctgcgtaaactgcacgggtctttaagctccagacgttttc

SEQ ID NO: 1243 - DNA, 50 bp, Homo Sapien
tgtgtgcaacacgtgccctgaaaagtggatcaatttccaacggaagtgct

SEQ ID NO: 1244 - DNA, 50 bp, Homo Sapien
tgaataagccattctgactcatatcccctatttaacagggtctctagtgc

SEQ ID NO: 1245 - DNA, 50 bp, Homo Sapien
acagaaaaagcgacgctttaagactcataacgaacacttggctggagtgc

SEQ ID NO: 1246 - DNA, 50 bp, Homo Sapien
taactgagcatacccagtgggccaacaagcacgctctaaatacaaaacca

SEQ ID NO: 1247 - DNA, 50 bp, Homo Sapien
gcctacccaccaatccttaacgcgcctcaccggaccttaacattccaccc

SEQ ID NO: 1248 - DNA, 50 bp, Homo Sapien
cattgccaagggcattgtccagaaactcccctgagaccttactccttcca

SEQ ID NO: 1249 - DNA, 50 bp, Homo Sapien
gccacccggctacctaattcctcagtaacctccatctaaaatctccaagg

SEQ ID NO: 1250 - DNA, 50 bp, Homo Sapien
tatcttatatatctgtattcgcatggtaacatatcttcggccttcctgag

SEQ ID NO: 1251 - DNA, 50 bp, Homo Sapien
cggtacatttgtaactctggtttcaagcgtaaagccggcacgtccagcct

SEQ ID NO: 1252 - DNA, 50 bp, Homo Sapien
gttatactgtggctatgcaacagctctcacctacgcgagtcttactttga

SEQ ID NO: 1253 - DNA, 50 bp, Homo Sapien
tgactacattgtccccaacctgttttgagtagacacaccagctcctgttg

SEQ ID NO: 1254 - DNA, 50 bp, Homo Sapien
taactcaccagcctctgctcttatctttgtaataaatgttaaagccagaa

SEQ ID NO: 1255 - DNA, 50 bp, Homo Sapien
tggcggcggatggagacttcaagattaagtgcgtggcctttgagtgaagc

SEQ ID NO: 1256 - DNA, 50 bp, Homo Sapien
tgatttcatgtgcggggatcatctgccgtgcctggatcctgaaatagagg

SEQ ID NO: 1257 - DNA, 50 bp, Homo Sapien
ccagaacatgttacaccactcctacgatggcttgcccgattcgatgcccc

SEQ ID NO: 1258 - DNA, 50 bp, Homo Sapien
aaatagttaccttcaaaggccaagagaattctatttgaagcatgctctgt

SEQ ID NO: 1259 - DNA, 50 bp, Homo Sapien
tcctcaagaggtgccacgtctccacacatcagcacaactacgcagcgcct

SEQ ID NO: 1260 - DNA, 50 bp, Homo Sapien
gcagcaaaataatagcctcggttctatgcatatatggattagctataaaa

SEQ ID NO: 1261 - DNA, 50 bp, Homo Sapien
accccccacgatccaagagaaaaaccgatagcacgtaacccgctgctcag

SEQ ID NO: 1262 - DNA, 50 bp, Homo Sapien
gctcattttattatgacctatatgctcctgatttaaagagatctgtgtac

SEQ ID NO: 1263 - DNA, 50 bp, Homo Sapien
agaagatatgttcagcgatcccaactttcttgctcatgccacttacccca

SEQ ID NO: 1264 - DNA, 50 bp, Homo Sapien
ttccacccactgagccctctagtactactagggcatactatggaaatatt

SEQ ID NO: 1265 - DNA, 50 bp, Homo Sapien
aaattgtgagtaagctttgcagttactgtgaactattgtctcttggagga

SEQ ID NO: 1266 - DNA, 50 bp, Homo Sapien
acgaagctctgcgtcacccatacatcactgtttggtatgaccccgccgaa

SEQ ID NO: 1267 - DNA, 50 bp, Homo Sapien
ctcaaataataccctgggtatgcaggacccactataccttgcatttgctg

SEQ ID NO: 1268 - DNA, 50 bp, Homo Sapien
cttatgattataaccgtgttgaactctctgagataaacggagatgcaggg

SEQ ID NO: 1269 - DNA, 50 bp, Homo Sapien
cccggggacatgtgctagatgatactgtacatattcgtttggtttcactg

SEQ ID NO: 1270 - DNA, 50 bp, Homo Sapien
agaggcagaagtcaaaacggggacgacctcctttaaaatcaaccctctca

SEQ ID NO: 1271 - DNA, 50 bp, Homo Sapien
acctaataaacacaactgtgttactaattgatgctatactgagctgacaa

SEQ ID NO: 1272 - DNA, 50 bp, Homo Sapien
acggatcgctcccatgtttggtccacttaccacccactttgtgtttcctt

SEQ ID NO: 1273 - DNA, 50 bp, Homo Sapien
cttggccatcaaataagtaggcatagagtgtgactcgccctctcttggtc

SEQ ID NO: 1274 - DNA, 50 bp, Homo Sapien
aggccctccacgttatctaggagatcgctacaagttttatctggagaatc

SEQ ID NO: 1275 - DNA, 50 bp, Homo Sapien
actttgacatcgagtggcgtgaccggcgcatcacactgagggcgtccaat

SEQ ID NO: 1276 - DNA, 50 bp, Homo Sapien
ctgcaagaaatgtgttgctagttacccaacattacgccaagatcagtgat

SEQ ID NO: 1277 - DNA, 50 bp, Homo Sapien
acttccttcctgttaaacccctgttaactctccataaatttggtgattct

SEQ ID NO: 1278 - DNA, 50 bp, Homo Sapien
tgtatccgaaacacggtgacaccgctggtgccggctaaacccccattgtg

SEQ ID NO: 1279 - DNA, 50 bp, Homo Sapien
caggtgagaacatccataatttggggccctgagttttacccagactcaag

SEQ ID NO: 1280 - DNA, 50 bp, Homo Sapien
atacatcttggtcatcttgatctcataacgctggtataaggtggtctggt

SEQ ID NO: 1281 - DNA, 50 bp, Homo Sapien
ccttatgagaagaggccagaacttggttatcctcttccaatgtgaggaca

SEQ ID NO: 1282 - DNA, 50 bp, Homo Sapien
ggatctaaaaagagcgattacattaagctctatgtgcgccgtgtattcat

SEQ ID NO: 1283 - DNA, 50 bp, Homo Sapien
tgagagaccagaccgctccccaatactctcctaaaataaacatgaagcac

SEQ ID NO: 1284 - DNA, 50 bp, Homo Sapien
gttcactgatgcagttgtgtcctggctaaatcagaactcgaatggccttg

SEQ ID NO: 1285 - DNA, 50 bp, Homo Sapien
gactgatgtactgtggcagacagaactagttgctgtctcaatatccattc

SEQ ID NO: 1286 - DNA, 50 bp, Homo Sapien
tcttgccaagcgcagtcgcagtggtaaattccgcctcgtgaccaagttta

SEQ ID NO: 1287 - DNA, 50 bp, Homo Sapien
caaagagtttggcatcattctcgtcatagaagggagggtaaccgcagagc

SEQ ID NO: 1288 - DNA, 50 bp, Homo Sapien
aaaagagagaagaggcaccactaaaagatcgcagtttgcctggtgcagtg

SEQ ID NO: 1289 - DNA, 50 bp, Homo Sapien
tctggctaggcttatacctcgcatgtgtcacaacgttaacagagttgttt

SEQ ID NO: 1290 - DNA, 50 bp, Homo Sapien
acatccgggagattggagacctgtggggacatttgcatgaccgctacgga

SEQ ID NO: 1291 - DNA, 50 bp, Homo Sapien
aatctggctggatgacttttctagaagttacaggaaagatctgtgaaatg

SEQ ID NO: 1292 - DNA, 50 bp, Homo Sapien
ataagcctgagccttagctcccagctagggggcgttatttatggaccact

SEQ ID NO: 1293 - DNA, 50 bp, Homo Sapien
acccaaatactcacaagggtcttatcagacgcccgtcttaaagtccagca

SEQ ID NO: 1294 - DNA, 50 bp, Homo Sapien
ttcagtccttacgggtaaacagattgagcatggctctctattccctcagc

SEQ ID NO: 1295 - DNA, 50 bp, Homo Sapien
atcacccaagagccataatacacctattataagcgaccagcataataaag

SEQ ID NO: 1296 - DNA, 50 bp, Homo Sapien
ggccctcacagatgtctaggcaggcctcatttcatcacgcagcatgtgca

SEQ ID NO: 1297 - DNA, 50 bp, Homo Sapien
tcagcccgcgcgtggaaccgagacaagtaaacaagacgccagatctctga

SEQ ID NO: 1298 - DNA, 50 bp, Homo Sapien
cactgaccatgaatctagttcccatcatgacttagaaggtgctgtaggtg

SEQ ID NO: 1299 - DNA, 50 bp, Homo Sapien
cctagcacaaaataagggcataagaaatactagttacatcacaaggtcag

SEQ ID NO: 1300 - DNA, 50 bp, Homo Sapien
tcacacatgcaaattgtcagcttattgagacaacccacttagattcatat

SEQ ID NO: 1301 - DNA, 50 bp, Homo Sapien
cgtcgccttcaactgtaatcacaacatcctgactccgtcatttaataaag

SEQ ID NO: 1302 - DNA, 50 bp, Homo Sapien
gagattactctaaggccttcctcctacagacagtagacggaaagcaccaa

SEQ ID NO: 1303 - DNA, 50 bp, Homo Sapien
aggaagctgggagatttgggccatgtagctgcctttgttactctatttat

SEQ ID NO: 1304 - DNA, 50 bp, Homo Sapien
agcccaggactcggggtgaagtattacatcgacccctccacctacgagga

SEQ ID NO: 1305 - DNA, 50 bp, Homo Sapien
tgatggttttagcaatacctaaatccgtgatatcatcagaggttgcaaaa

SEQ ID NO: 1306 - DNA, 50 bp, Homo Sapien
gaaatcaacgttaccgccatttgatgatattgtggatcccaatgattcag

SEQ ID NO: 1307 - DNA, 50 bp, Homo Sapien
cagacccttgtccttgctgtggaaatgatgagggatggagggacaagagg

SEQ ID NO: 1308 - DNA, 50 bp, Homo Sapien
tgtgatcaggcaacaagtcaaggataacgccaaatggtatatcactgatt

SEQ ID NO: 1309 - DNA, 50 bp, Homo Sapien
attctgggccggtaccaggttggtattactcatgaacgatatctgctttt

SEQ ID NO: 1310 - DNA, 50 bp, Homo Sapien
ttgatcctctacaactggtgttgctcccgttatgcggacagaagacagcc

SEQ ID NO: 1311 - DNA, 50 bp, Homo Sapien
gttccaacaagcaataccgcatctgtctcaaaaccctcaaggaagagttt

SEQ ID NO: 1312 - DNA, 50 bp, Homo Sapien
gctatcattctagggctggatttccctaactccagttattctgctgctgc

SEQ ID NO: 1313 - DNA, 50 bp, Homo Sapien
gcgcagcgggtggtcgcggaggtcctgctacccagtaaaaatccactatt

SEQ ID NO: 1314 - DNA, 50 bp, Homo Sapien
gaggatgctgaaacggcaagtcagtgtatcgatttctagtgctgtgaagt

SEQ ID NO: 1315 - DNA, 50 bp, Homo Sapien
gcggcaacaagtgatctggaacactatgacaagactcgtcatgaagaatt

SEQ ID NO: 1316 - DNA, 50 bp, Homo Sapien
atgggttgtaggattgaggaacggaatctgccgactcacatgacagccca

SEQ ID NO: 1317 - DNA, 50 bp, Homo Sapien
tttgtacctgtctggttaattctgcttacgtgtcaggctacacataaaag

SEQ ID NO: 1318 - DNA, 50 bp, Homo Sapien
gctgactcatcctaactaacagtcacgccgtgggatgtctctgtccacat

SEQ ID NO: 1319 - DNA, 50 bp, Homo Sapien
aacactttgggtacatgctgctaaaagcccgtcagctcgtcatccttgtt

SEQ ID NO: 1320 - DNA, 50 bp, Homo Sapien
caccttatatttacgtatgagacgtttatagccgaaatgatcttttcaag

SEQ ID NO: 1321 - DNA, 50 bp, Homo Sapien
aacagtagtgtccccatgaagtgctagataatatatgtgtaagagtcagc

SEQ ID NO: 1322 - DNA, 50 bp, Homo Sapien
gtcattagtgtcatgctataccgtaattaccttcgaagcatgcgcagaaa

SEQ ID NO: 1323 - DNA, 50 bp, Homo Sapien
aaggctctcactaccgtggaccacctagtctgtaactctttctgaggagc

SEQ ID NO: 1324 - DNA, 50 bp, Homo Sapien
agttgacaattctgcatgtactagtcctctagaaataggttaaactgaag

SEQ ID NO: 1325 - DNA, 50 bp, Homo Sapien
ctccaagaagcgaattcgaatggacagttacaccagttactgcaatgctg

SEQ ID NO: 1326 - DNA, 50 bp, Homo Sapien
tagttgacaggtaagctgtaggcatgtagagcaattgtcccaatgccact

SEQ ID NO: 1327 - DNA, 50 bp, Homo Sapien
tttaactttagcatgttgttgatcatggatcatactccccttgtttcttt

SEQ ID NO: 1328 - DNA, 50 bp, Homo Sapien
ctgctttgaattggcaccgaaaagtgggaataccggggagttgagatctg

SEQ ID NO: 1329 - DNA, 50 bp, Homo Sapien
ccaaacgggaatatccaatctcgagtttattccagtgcacaatctggaaa

SEQ ID NO: 1330 - DNA, 50 bp, Homo Sapien
cgtccactcccccgctatccaacgtcacatctaagcactatgacatgcac

SEQ ID NO: 1331 - DNA, 50 bp, Homo Sapien
ctggcactcccccacgtacgagtatgcgttgagacatttgtacgtgctgg

SEQ ID NO: 1332 - DNA, 50 bp, Homo Sapien
gcatctctagcccactttatatcctgccaccagtacttcttgtaatccca

SEQ ID NO: 1333 - DNA, 50 bp, Homo Sapien
tgttgtggggtcctcccatggatcatcaaggtgaaacactttggtattct

SEQ ID NO: 1334 - DNA, 50 bp, Homo Sapien
gcatgttttagggatcaattacctaactgttccttggtctatttatgtat

SEQ ID NO: 1335 - DNA, 50 bp, Homo Sapien
acaggagcatggttcctaataatagcccctgatagtctgctctttctttc

SEQ ID NO: 1336 - DNA, 50 bp, Homo Sapien
atccctactcaccgagtgttgagcccaaggggggatttgtagaacaagcc

SEQ ID NO: 1337 - DNA, 50 bp, Homo Sapien
tctcatcccgctgatcgttatacccgtcgttctgactgtcgccatggctg

SEQ ID NO: 1338 - DNA, 50 bp, Homo Sapien
ttgttttgggtcccacttaggattaacggatgtaaggtattttcctgtgc

SEQ ID NO: 1339 - DNA, 50 bp, Homo Sapien
acattatcaactagatactacacataccagcaccactactcacactacag

SEQ ID NO: 1340 - DNA, 50 bp, Homo Sapien
gtaaaatccaggattttatattcctacaactccgactcatttgctacatt

SEQ ID NO: 1341 - DNA, 50 bp, Homo Sapien
gcctgagaagcatctgggcatctactccgtgttgcccaaccacaaggctg

SEQ ID NO: 1342 - DNA, 50 bp, Homo Sapien
acaacaccagcgcccaatatacgcgaatgaggcgccctatacccgcctct

SEQ ID NO: 1343 - DNA, 50 bp, Homo Sapien
tctaagtggggtcatgctgaccgatgtaagtcccgagcccctccaagctc

SEQ ID NO: 1344 - DNA, 50 bp, Homo Sapien
tgcttattacgtatgattactcacagcgatctattgttccatataaccaa

SEQ ID NO: 1345 - DNA, 50 bp, Homo Sapien
ggccagtaaacacctgttcctgagtgatacatctttaaggagccggtaga

SEQ ID NO: 1346 - DNA, 50 bp, Homo Sapien
ttctgtagcttagagtgctcacttactacctctgaacaatactcacgctg

SEQ ID NO: 1347 - DNA, 50 bp, Homo Sapien
actgtgtgggacttattgaggtggtgcgaaattctcacactattatgcaa

SEQ ID NO: 1348 - DNA, 50 bp, Homo Sapien
tccgtgtggacacgccacattatccccgctggatcaccaaggagtccaag

SEQ ID NO: 1349 - DNA, 50 bp, Homo Sapien
gacaagtaatcactaacccgttttattctattcctatctgtggatgtgta

SEQ ID NO: 1350 - DNA, 50 bp, Homo Sapien
acctcagccaagatgaagcgccgcagcagttaacctatgaccgtgcagag

SEQ ID NO: 1351 - DNA, 50 bp, Homo Sapien
ggccccggcagctaattccgaccaaaccgtaaccgtgaaagagtgacaag

SEQ ID NO: 1352 - DNA, 50 bp, Homo Sapien
atgcaccgcttgtcaatgtgaccctctactatgaagcactgtgcggtggc

SEQ ID NO: 1353 - DNA, 50 bp, Homo Sapien
aagactgcttcagggagacacacccgtgaggaagttgcaagccaacaaaa

SEQ ID NO: 1354 - DNA, 50 bp, Homo Sapien
ctgtgctcagggtctcaactcgtggtcaagcttatatcctagaatattac

SEQ ID NO: 1355 - DNA, 50 bp, Homo Sapien
cagccaccgaatgcttaagaactcatctaagccagtcctctcattgattg

SEQ ID NO: 1356 - DNA, 50 bp, Homo Sapien
ttagatttaagtctgactgaggcatgttcaaagacactacactgcctctc

SEQ ID NO: 1357 - DNA, 50 bp, Homo Sapien
gctcaggctaaaaagagtcttgatcaggatccagttgtacgtgctcagga

SEQ ID NO: 1358 - DNA, 50 bp, Homo Sapien
gaactaaggctacacagagggtcgcacttggactctgagggttgggtgtg

SEQ ID NO: 1359 - DNA, 50 bp, Homo Sapien
tacaatccaaatttgtcgtagacttgtgcaatatatactgttgtgggttg

SEQ ID NO: 1360 - DNA, 50 bp, Homo Sapien
tgcggcatgtgcttattgccgttggcctgctcacttgtatcaacctgctg

SEQ ID NO: 1361 - DNA, 50 bp, Homo Sapien
ataaatttgacctgctcatctatacacggttacccagaacctaagaagat

SEQ ID NO: 1362 - DNA, 50 bp, Homo Sapien
agggctggagtctgcacgggacctattagagtattttccacaatgatgat

SEQ ID NO: 1363 - DNA, 50 bp, Homo Sapien
tccttctaaacacagctatctagagagccacatcctgttgactgaaagtg

SEQ ID NO: 1364 - DNA, 50 bp, Homo Sapien
cctctactgactcctccggtgagggaagctattaaagcagaaggggttgc

SEQ ID NO: 1365 - DNA, 50 bp, Homo Sapien
cagagaagagattacaccagcggtaacactgccaaccgagactaaaggaa

SEQ ID NO: 1366 - DNA, 50 bp, Homo Sapien
ctgatgagtatctcccagaacaacgatctcacctctacgggataactgca

SEQ ID NO: 1367 - DNA, 50 bp, Homo Sapien
gtattactcattagtgcacaagtattacttagtgcacaatatacagtctc

SEQ ID NO: 1368 - DNA, 50 bp, Homo Sapien
agtttcagctccgtgtgtgagatgtgcaggttttttctagggggtagggg

SEQ ID NO: 1369 - DNA, 50 bp, Homo Sapien
actgacacctgtctgggggcgttctacgctggtgattgcccttagctcct

SEQ ID NO: 1370 - DNA, 50 bp, Homo Sapien
actccccgaagtcttttgttcgcatggtcacacactgatgcttagatgtt

SEQ ID NO: 1371 - DNA, 50 bp, Homo Sapien
agtggaacgtgccggaactttttgtccattccctagtaggcctgccacag

SEQ ID NO: 1372 - DNA, 50 bp, Homo Sapien
cacggggtaactgcgatcattgcacttggtgttcacagtgggccaggcac

SEQ ID NO: 1373 - DNA, 50 bp, Homo Sapien
acctgcatcactaccgcaacctcagcgagttcttccggcgcaagctgaag

SEQ ID NO: 1374 - DNA, 50 bp, Homo Sapien
gaattagcactggatactcctagagcaccacagttggtgggccagtttat

SEQ ID NO: 1375 - DNA, 50 bp, Homo Sapien
gggccagtcacatcagggctctccgttggtgacaaggcataattctgctg

SEQ ID NO: 1376 - DNA, 50 bp, Homo Sapien
attactacaagccgtggttctttaagcatgtggagaactatctgaagaca

SEQ ID NO: 1377 - DNA, 50 bp, Homo Sapien
gaggatcctgcgttaatctatgactatgccattgtgctattcaagggtca

SEQ ID NO: 1378 - DNA, 50 bp, Homo Sapien
ccctaataccaaggcgctacgtttattgcctcgtcttattcactgacctt

SEQ ID NO: 1379 - DNA, 50 bp, Homo Sapien
aaaatgccttccgacgaatgggacagcccaaaaggcttaactttagtgtt

SEQ ID NO: 1380 - DNA, 50 bp, Homo Sapien
cttcacttttgctaccttgatatagcattgggctatcatgttacaacatt

SEQ ID NO: 1381 - DNA, 50 bp, Homo Sapien
accgcacttatatgcattgctagtatggaatttaagataccatacacagt

SEQ ID NO: 1382 - DNA, 50 bp, Homo Sapien
acacttgcctatacagagacataaccacacacactcagaggatagtgaac

SEQ ID NO: 1383 - DNA, 50 bp, Homo Sapien
tacccaacctgtagctaagaatacctccatgagccctcgacagcgccggg

SEQ ID NO: 1384 - DNA, 50 bp, Homo Sapien
gcaggcatcaagattacgcgaagaagcgcataacatgggaactattcaca

SEQ ID NO: 1385 - DNA, 50 bp, Homo Sapien
cgccacctcttaatccactcggaggaccagcgatctaactgtgctgtgtg

SEQ ID NO: 1386 - DNA, 50 bp, Homo Sapien
caagttcatgggcatgtccgtgggggtctctatgataggggaaggtgtgt

SEQ ID NO: 1387 - DNA, 50 bp, Homo Sapien
ctcacattcagagttccagtcattattgttacatcatgtttgcagaaacc

SEQ ID NO: 1388 - DNA, 50 bp, Homo Sapien
atgtcattcataaccccttgatctgtagtgtcatgggtgctgccgcaggc

SEQ ID NO: 1389 - DNA, 50 bp, Homo Sapien
ctggtcaccattagaagagtcaaggatttttaaccgaaaacttgctgatg

SEQ ID NO: 1390 - DNA, 50 bp, Homo Sapien
ctgtgaaactccgcccgactgtgacgaatgatcgctcggcacccatcatt

SEQ ID NO: 1391 - DNA, 50 bp, Homo Sapien
acaagtgcgaaggagttgcggttgctccatgttctgacttagggcaattt

SEQ ID NO: 1392 - DNA, 50 bp, Homo Sapien
ctcctgcttgtgtccgccgctctatccagtgttgtatcacggactgattc

SEQ ID NO: 1393 - DNA, 50 bp, Homo Sapien
catgccgataagtaaacgtcgaacaattgcccttcaaccactccctctaa

SEQ ID NO: 1394 - DNA, 50 bp, Homo Sapien
tggacatcagccaaatttgaacccaatcaaatataacgtgtctgacactg

SEQ ID NO: 1395 - DNA, 50 bp, Homo Sapien
tgtgtgtgcaaatcctgggatgcccgtttcacgctctgacataaagacat

SEQ ID NO: 1396 - DNA, 50 bp, Homo Sapien
ctactaatccagcgacaatttgaatcggttttgtaggtagaggaataaaa

SEQ ID NO: 1397 - DNA, 50 bp, Homo Sapien
accacaccccatgagggaagctctaaatagccaacacccatctgtttttt

SEQ ID NO: 1398 - DNA, 50 bp, Homo Sapien
gtttctgttcaccttcgtttactatgcctgtgtcttctccaccacgctgg

SEQ ID NO: 1399 - DNA, 50 bp, Homo Sapien
atgtacgtcggggacgtccgcagcgtcacacagaagcatatccaggagtg

SEQ ID NO: 1400 - DNA, 50 bp, Homo Sapien
aaaaggcaatcgggcactggaccagtttaccctggcgagctttggagaag

SEQ ID NO: 1401 - DNA, 50 bp, Homo Sapien
aacacacggaactatgaaggacagaccccattggctgtttcaataagtat

SEQ ID NO: 1402 - DNA, 50 bp, Homo Sapien
gaattccttctcaccagaggtatttgtgctgcctgttgatgtagaaaagg

SEQ ID NO: 1403 - DNA, 50 bp, Homo Sapien
cgagacacaacacttgtcctcttggaggttacattcttgctggggggagg

SEQ ID NO: 1404 - DNA, 50 bp, Homo Sapien
ttttctttattcggcataattcctcaggtagcatcctattcttggggaga

SEQ ID NO: 1405 - DNA, 50 bp, Homo Sapien
tgatgccggcaaatattactgtagagctgacaacggccatgtgcctatcc

SEQ ID NO: 1406 - DNA, 50 bp, Homo Sapien
gctgtgtataagatggcagacgtagcctgcaaatgccacggcgtctcggg

SEQ ID NO: 1407 - DNA, 50 bp, Homo Sapien
gttacaaaaggcataatcggaaatagagactacatacttgagtttatggg

SEQ ID NO: 1408 - DNA, 50 bp, Homo Sapien
caatgtttgatgcataattggaccttgaatcgataagtgtaaatacagct

SEQ ID NO: 1409 - DNA, 50 bp, Homo Sapien
tttcttgttgctcaaaaaatgagctcgcatttgtcaatgacagtttcttt

SEQ ID NO: 1410 - DNA, 50 bp, Homo Sapien
aacagaaacgctcagccggtgttccggtaagaggcgtggagcttcaggct

SEQ ID NO: 1411 - DNA, 50 bp, Homo Sapien
acccccaacgcgtcctctcacaccgtccactgtgcgtttgtatgtgtctg

SEQ ID NO: 1412 - DNA, 50 bp, Homo Sapien
catgtaggttgcttggtaataacctttttgtatatcacaatttgggtgaa

SEQ ID NO: 1413 - DNA, 50 bp, Homo Sapien
ctgaagtgcttagtgtacttggagtattggggtctgaccccaaacacctt

SEQ ID NO: 1414 - DNA, 50 bp, Homo Sapien
gcttgttttccagtctcttgtacagcgttttaaaagaaatggattctatt

SEQ ID NO: 1415 - DNA, 50 bp, Homo Sapien
ggggcgattctcttgttgttccgatagtgtctcgcgggcgaaaccaccag

SEQ ID NO: 1416 - DNA, 50 bp, Homo Sapien
ggaattccagtattgtgtctaaattctgtggatgatgttttctcacccag

SEQ ID NO: 1417 - DNA, 50 bp, Homo Sapien
acgaagacggcctttttaccctctaacaacgcagtagcatgttagattga

SEQ ID NO: 1418 - DNA, 50 bp, Homo Sapien
aggtagaagtagaggcctaccttgaattaagggttatactcagtttttaa

SEQ ID NO: 1419 - DNA, 50 bp, Homo Sapien
gtgatatccagtggcacttgtaatggcgtcttcattcagttcatgcaggg

SEQ ID NO: 1420 - DNA, 50 bp, Homo Sapien
gaataagcctaacacagtagaaattgctgtatggtgtagataaaacaatc

SEQ ID NO: 1421 - DNA, 50 bp, Homo Sapien
ttgttcaatcactgatgggcaaaggggagatgtagctaactggtggccct

SEQ ID NO: 1422 - DNA, 50 bp, Homo Sapien
ctgatggccttgtacagagaacccgatgattgatgagggtatagcacagc

SEQ ID NO: 1423 - DNA, 50 bp, Homo Sapien
taaaccaccacgaccagattccccagccactacgccaaatatatctgtga

SEQ ID NO: 1424 - DNA, 50 bp, Homo Sapien
aaaaaattggccgtcaaaacctgagtcctgtcctcttgccctcctccccg

SEQ ID NO: 1425 - DNA, 50 bp, Homo Sapien
ctgtcataaacattggatttcccgcggagtaacctggcgacatatttaga

SEQ ID NO: 1426 - DNA, 50 bp, Homo Sapien
atctgtattgaactttcggccctagaaaccagtggagttatttcaccaca

SEQ ID NO: 1427 - DNA, 50 bp, Homo Sapien
gcaaattggtagaccttataagaaggcacttgtttgtaagccagagaaga

SEQ ID NO: 1428 - DNA, 50 bp, Homo Sapien
aaaacacagaggcattgctatttggtaagttaagcttctgtgattgtaat

SEQ ID NO: 1429 - DNA, 50 bp, Homo Sapien
tacattgcctacgcgcacagcaccatcatgccgcggctaagtgaggaagc

SEQ ID NO: 1430 - DNA, 50 bp, Homo Sapien
atatttgccaccgtccgtgaactggtctcagggggccgaagtgtccggtt

SEQ ID NO: 1431 - DNA, 50 bp, Homo Sapien
catctatgctttgtagtatgactcctgtcactcagtacaattattttgag

SEQ ID NO: 1432 - DNA, 50 bp, Homo Sapien
acagttcacactgattgtgacacattcttagtagctagtgtctgttctag

SEQ ID NO: 1433 - DNA, 50 bp, Homo Sapien
gggtcaaaccatacatcgcttcgtctctgtagtgatgacttcctgtcctc

SEQ ID NO: 1434 - DNA, 50 bp, Homo Sapien
gtccagtgtctccctttgcataacctgctgcattgcattgacagtggagt

SEQ ID NO: 1435 - DNA, 50 bp, Homo Sapien
gctgagcatcgataccgtgtgaataacctcagccagcgagatctggccat

SEQ ID NO: 1436 - DNA, 50 bp, Homo Sapien
tactatggagatcaacagttactgtgactgagtcggcccattctgtttag

SEQ ID NO: 1437 - DNA, 50 bp, Homo Sapien
gagagggtttattacgattttgggagtggtcgattatgtactactttgac

SEQ ID NO: 1438 - DNA, 50 bp, Homo Sapien
gggaaggaggactccggtcttaactcccacgctaactttagctcaagtgg

SEQ ID NO: 1439 - DNA, 50 bp, Homo Sapien
ttccatggagacgcagatggctcgttcggaacaccacctggatacggctg

SEQ ID NO: 1440 - DNA, 50 bp, Homo Sapien
gcgtttgtgtctcgggttaaaataaggttccgtccgcgtgctgggtcaga

SEQ ID NO: 1441 - DNA, 50 bp, Homo Sapien
tggtcttggctttggtccacttgctgaacattttggcttcaggaagcagt

SEQ ID NO: 1442 - DNA, 50 bp, Homo Sapien
agaatacctcggcaaattccgacgtcttgaagacttccgagtagatcccc

SEQ ID NO: 1443 - DNA, 50 bp, Homo Sapien
cttttggagtagtgtattctatgggtccagtccctttcatgcagccatta

SEQ ID NO: 1444 - DNA, 50 bp, Homo Sapien
gatagctgtaactcacagttaacatgctttcagtcaagtacagattgtgt

SEQ ID NO: 1445 - DNA, 50 bp, Homo Sapien
gttaaaccagatcctacggcagtccacgacccaccttgctgatgggcctt

SEQ ID NO: 1446 - DNA, 50 bp, Homo Sapien
taaagaaagccatacatagaatgcttcaagctatcttgctatgcacatta

SEQ ID NO: 1447 - DNA, 50 bp, Homo Sapien
agaaatgtctcgctgatgcgggagatcgacgcgaaataccaagagatcct

SEQ ID NO: 1448 - DNA, 50 bp, Homo Sapien
ggtttgggacttaccggggtgatgttagatctggaacccccaagtgaggc

SEQ ID NO: 1449 - DNA, 50 bp, Homo Sapien
cactcgacaggttgacaacctagacagctcccccggacttgccttacttt

SEQ ID NO: 1450 - DNA, 50 bp, Homo Sapien
aggtcattccacatcagtttgatggtgtcccagacaagctaatccaagca

SEQ ID NO: 1451 - DNA, 50 bp, Homo Sapien
gcacccatattttaagctgctttttcaggggataaatagtgtttggggac

SEQ ID NO: 1452 - DNA, 50 bp, Homo Sapien
ttaggggatggtagacctttattgggtatcaagacatagcatccaagtgg

SEQ ID NO: 1453 - DNA, 50 bp, Homo Sapien
attttaggactctaccgaataggaggagtgaactccaaagttcaaaaact

SEQ ID NO: 1454 - DNA, 50 bp, Homo Sapien
cgctgctcgaagcagctgtatagcctgtgactctccgtgtgtcagctcct

SEQ ID NO: 1455 - DNA, 50 bp, Homo Sapien
tgccgtatctgctgcagacatgattgtttcttgttctagaggttttcttg

SEQ ID NO: 1456 - DNA, 50 bp, Homo Sapien
gacaaagcttggagactatgccaacctaaaacaattctaccgagaccttg

SEQ ID NO: 1457 - DNA, 50 bp, Homo Sapien
gtttatacaactgtcagtccacccagtggtgcaactggttctgattcagt

SEQ ID NO: 1458 - DNA, 50 bp, Homo Sapien
tgatgctgagagcagcaaatgtgtctgccgagaagcatcggagtgcgagg

SEQ ID NO: 1459 - DNA, 50 bp, Homo Sapien
tgttagtgttaggctattaacaatagttaggtgaaaggtaatgagggcat

SEQ ID NO: 1460 - DNA, 50 bp, Homo Sapien
acgcttacagcttttggctcgccaccatagagaggagcgagatgttcaag

SEQ ID NO: 1461 - DNA, 50 bp, Homo Sapien
tcatggataagatgcgggtgatgggcctacgccggcagcggaactatgct

SEQ ID NO: 1462 - DNA, 50 bp, Homo Sapien
tgtttcccgctgtgtgtatagcgtcatgccctatgcattcccacagactc

SEQ ID NO: 1463 - DNA, 50 bp, Homo Sapien
cataagttgcttgaaagtcgagaatggcagacatagggttgtggtgttgc

SEQ ID NO: 1464 - DNA, 50 bp, Homo Sapien
atcatagacgagacagtccattcatcttagttaaattggattgagaatgc

SEQ ID NO: 1465 - DNA, 50 bp, Homo Sapien
attgtctgcagtagttaaatggcacattgtactccacgattttccaaatg

SEQ ID NO: 1466 - DNA, 50 bp, Homo Sapien
gggaaacatgcataagtgccaatcctttgaatgttccacggaaacactgg

SEQ ID NO: 1467 - DNA, 50 bp, Homo Sapien
ctctgtttcatgctaaccagacacgccgtgcactcgttagattcctttct

SEQ ID NO: 1468 - DNA, 50 bp, Homo Sapien
aaaagcaaagatgccggaagccccaaaaagcccaccctagtgagtctgcc

SEQ ID NO: 1469 - DNA, 50 bp, Homo Sapien
caacccagtcctccttaccttgcacctattaacgttggttcaacatgaag

SEQ ID NO: 1470 - DNA, 50 bp, Homo Sapien
agtctttcagtacacgttactggtaagtagtttccaagttacgtgttgtc

SEQ ID NO: 1471 - DNA, 50 bp, Homo Sapien
agtctcactacttctgacactctggttattgggcactaagggccagactg

SEQ ID NO: 1472 - DNA, 50 bp, Homo Sapien
cactctagttcaaatccacattctagttgaatccctgcaatgtaacttga

SEQ ID NO: 1473 - DNA, 50 bp, Homo Sapien
cagtgatgtgctaatacactgatcaggtttagacaatgagctttggttgt

SEQ ID NO: 1474 - DNA, 50 bp, Homo Sapien
taatcaacttcaaggagcaccttcattagtacagcttgcatatttaacat

SEQ ID NO: 1475 - DNA, 50 bp, Homo Sapien
aaacatattgagtaccggttgaaagtgtctctaccttgtgatctcggagc

SEQ ID NO: 1476 - DNA, 50 bp, Homo Sapien
tgtgctttcgcctttgcatgtaagtacggtagtaagaaacctttgagatc

SEQ ID NO: 1477 - DNA, 50 bp, Homo Sapien
cccgagcacgacatggagcttgcgtttgacgttcaattcagcgtggagga

SEQ ID NO: 1478 - DNA, 50 bp, Homo Sapien
agcttgaactgtacggtccgtcctgcactcacccgatgcagaccttgact

SEQ ID NO: 1479 - DNA, 50 bp, Homo Sapien
gacacggaccttcatggaagtccttgctctgcgtggcatctgtcagcttt

SEQ ID NO: 1480 - DNA, 50 bp, Homo Sapien
ggccccttgccgattttctatacccccccacaaatccctctttttacaat

SEQ ID NO: 1481 - DNA, 50 bp, Homo Sapien
caagtctggtgaacgaatgagccagattagtgtaatatttaggacaggaa

SEQ ID NO: 1482 - DNA, 50 bp, Homo Sapien
tctagattagtctccaccgccgtccaggacccacttgcagcatggagtcg

SEQ ID NO: 1483 - DNA, 50 bp, Homo Sapien
gaagttctagaaaccgcagctgacatctcgacccaagagatttaggattc

SEQ ID NO: 1484 - DNA, 50 bp, Homo Sapien
aactgaggcacgagcaaagtgaagacactggctcatattcctgcagcctg

SEQ ID NO: 1485 - DNA, 50 bp, Homo Sapien
aacacggctcacgcttacctcaaccatcctggctgcggcgtctgtctgaa

SEQ ID NO: 1486 - DNA, 50 bp, Homo Sapien
gatcctcatggtctgccacgtaatcattttcttagacgtttgctccacca

SEQ ID NO: 1487 - DNA, 50 bp, Homo Sapien
acgcagactgagcatagacagagcgcagacaatcacaaagcagaaaagca

SEQ ID NO: 1488 - DNA, 50 bp, Homo Sapien
ctgatttttaagacttagaataaggaggtggggaatgtgaaatatctcat

SEQ ID NO: 1489 - DNA, 50 bp, Homo Sapien
gagaaccgcgacgagcaccacataagccgtaggaccgcatgaaagaagag

SEQ ID NO: 1490 - DNA, 50 bp, Homo Sapien
atgagaacttatcatgttggtgtgttaggtaaatcgggcaaatatgatag

SEQ ID NO: 1491 - DNA, 50 bp, Homo Sapien
accttggcaagatatttacccaccggccatctctgtttactcatgaatgt

SEQ ID NO: 1492 - DNA, 50 bp, Homo Sapien
caacttaatggcagactgtgatcgctaactgcatctggcacaaaaacatg

SEQ ID NO: 1493 - DNA, 50 bp, Homo Sapien
cttctcatatgatagcttatgatgccggaattctgtaaacaataaagatg

SEQ ID NO: 1494 - DNA, 50 bp, Homo Sapien
tagtcacattagtacataggtgtcctttgcaactgctgtcaactctacat

SEQ ID NO: 1495 - DNA, 50 bp, Homo Sapien
caaaagacaagttgaagagtgagttggtcgccaacaatgtgacgctgccg

SEQ ID NO: 1496 - DNA, 50 bp, Homo Sapien
tccctatgagaacatacagagcttcctgtacacagttgcatgtactgcat

SEQ ID NO: 1497 - DNA, 50 bp, Homo Sapien
ttaaacgaacgtacttgcagatgtgacaagccgaggcggtgagccgggca

SEQ ID NO: 1498 - DNA, 50 bp, Homo Sapien
tgatggctatagcagaatgaggtcgggtcaggaccctcaaacaccatctg

SEQ ID NO: 1499 - DNA, 50 bp, Homo Sapien
ttcaagactgtattattcaaggcttaactgaaaccggtactgatttggaa

SEQ ID NO: 1500 - DNA, 50 bp, Homo Sapien
tttcattaagtggctacatcctaacatatgcattggtcaaggttgcagca

SEQ ID NO: 1501 - DNA, 50 bp, Homo Sapien
ggtacctaagtcttgtcatggacttacaggtttgcatgggttccaaatac

SEQ ID NO: 1502 - DNA, 50 bp, Homo Sapien
caggccaattccaagtcatatgcctagtctgcataatatcccagtgcctg

SEQ ID NO: 1503 - DNA, 50 bp, Homo Sapien
ctagggtctgataggaacagacctgaggcttatctttgcacatgttaaag

SEQ ID NO: 1504 - DNA, 50 bp, Homo Sapien
ctatagtgaatacttcgagtactttgccccagacttcacacttcatccag

SEQ ID NO: 1505 - DNA, 50 bp, Homo Sapien
tgttcagctgccccctagtgactccgtgtgtgaagagtacggtttgagct

SEQ ID NO: 1506 - DNA, 50 bp, Homo Sapien
aaattccgataaagccgaggttaaccggcattaaagaacgcgggaaaaag

SEQ ID NO: 1507 - DNA, 50 bp, Homo Sapien
gtgttagtaatcaaggtttagaacaccatgagatagttacccctgatctc

SEQ ID NO: 1508 - DNA, 50 bp, Homo Sapien
gattacatcttctctatggcaagcgtgacttcttgctgagtgacaaagcc

SEQ ID NO: 1509 - DNA, 50 bp, Homo Sapien
tatgtaacgatataagctatcggagggtggtaccgatcaggaacgctttt

SEQ ID NO: 1510 - DNA, 50 bp, Homo Sapien
ctttgggagggtattttgctctcgttagttttgtgggcagcctcagattc

SEQ ID NO: 1511 - DNA, 50 bp, Homo Sapien
cactgtatctctggaagtgatgcatgaattcgattggattgtgtcatttt

SEQ ID NO: 1512 - DNA, 50 bp, Homo Sapien
ctccttaatagggacctgtgactccttaataaggacctgtgacatgccca

SEQ ID NO: 1513 - DNA, 50 bp, Homo Sapien
agttcagtactgtaggaggatgggtatctactcgcgcatcaggcatgaag

SEQ ID NO: 1514 - DNA, 50 bp, Homo Sapien
ggcgtaggagtaacctcgcactttgctagctaacctgactccgggtgagg

SEQ ID NO: 1515 - DNA, 50 bp, Homo Sapien
attagaattagagcatgggagggtcatcactatgacctaaattatttact

SEQ ID NO: 1516 - DNA, 50 bp, Homo Sapien
gctgtagatatagtctaaggtagttaaccatataagccttttcaactctt

SEQ ID NO: 1517 - DNA, 50 bp, Homo Sapien
ttagccattgctgcaatctctgctgttgcctcctgttctgaaaaaattaa

SEQ ID NO: 1518 - DNA, 50 bp, Homo Sapien
gtgtaaagataaatgatctgcttattgatagtgtcatcgaatgagcatga

SEQ ID NO: 1519 - DNA, 50 bp, Homo Sapien
gtagcatggctctttcatataggactatttacaagactgctgagcagaat

SEQ ID NO: 1520 - DNA, 50 bp, Homo Sapien
taatggttctactaatttggactcacctgttatcgatggaaatggtacag

SEQ ID NO: 1521 - DNA, 50 bp, Homo Sapien
atggagattaagatgccttgaattgtctagggtgttctgtacttagaaag

SEQ ID NO: 1522 - DNA, 50 bp, Homo Sapien
atggtggcgtccctgaggtagtgtagggtggaagctatggtgcagcttgg

SEQ ID NO: 1523 - DNA, 50 bp, Homo Sapien
gcgtgactcatttcaacactaagtactaggggtgttgtcaggagacaaat

SEQ ID NO: 1524 - DNA, 50 bp, Homo Sapien
catggatgctttaattggaagtgggttgccgacccccttgtgcctagaaa

SEQ ID NO: 1525 - DNA, 50 bp, Homo Sapien
ggtgaaaaggtagggctgagtgattaccttagccacagggtggctgagca

SEQ ID NO: 1526 - DNA, 50 bp, Homo Sapien
aatggttaaacacaaaaggctgatagctggtatcacatagttggagtcag

SEQ ID NO: 1527 - DNA, 50 bp, Homo Sapien
cattcgaatactaaaatagtgggagtggtctttttcgtcatccctgcggc

SEQ ID NO: 1528 - DNA, 50 bp, Homo Sapien
tctcctctggcttccctctctgaaatagccgaactccaggctgggctgag

SEQ ID NO: 1529 - DNA, 50 bp, Homo Sapien
atttactaacatatgataggtattaagccactagggtcatgcctgacccc

SEQ ID NO: 1530 - DNA, 50 bp, Homo Sapien
caccaaggaccgcctgggccggacgaatgcgagattttggacatcatcat

SEQ ID NO: 1531 - DNA, 50 bp, Homo Sapien
tgttcagaaaggtattaagggcttaggccaaatcttactttgagtatgtt

SEQ ID NO: 1532 - DNA, 50 bp, Homo Sapien
catcagggaagcagtaccgcctggaagttggacctgcgtgcttcctctga

SEQ ID NO: 1533 - DNA, 50 bp, Homo Sapien
ttcagtgtcttgtacaggtaaggcactcaatgttgttaacatgccctttt

SEQ ID NO: 1534 - DNA, 50 bp, Homo Sapien
tcaggtaaggcctcgccaagcctctatgcaccccacaaagtttctgcctc

SEQ ID NO: 1535 - DNA, 50 bp, Homo Sapien
atgataaaactggtgaatatccagtccccctaattagaagagcctgggaa

SEQ ID NO: 1536 - DNA, 50 bp, Homo Sapien
gccttcgacgagcccaaagtagaactgcatgtccacctagacggatccat

SEQ ID NO: 1537 - DNA, 50 bp, Homo Sapien
ttcccccactcctcttatttgctcacacggggtattttaggcagggattt

SEQ ID NO: 1538 - DNA, 50 bp, Homo Sapien
tccctattcgtagccatctccgtggccaatgtgactaccgtgccagcagc

SEQ ID NO: 1539 - DNA, 50 bp, Homo Sapien
gacagaggacccagatcttcaggtttctgcgatgcagcaccagacagtgc

SEQ ID NO: 1540 - DNA, 50 bp, Homo Sapien
catgagtgtgatccacattgttaggtgctgacctagacagagatgaactg

SEQ ID NO: 1541 - DNA, 50 bp, Homo Sapien
gaaaccctcaaataggccagaacaactcactaattaaattcatcccctcc

SEQ ID NO: 1542 - DNA, 50 bp, Homo Sapien
cattaatattggtggattgcagcaatttgctactgaggtattcaaagcaa

SEQ ID NO: 1543 - DNA, 50 bp, Homo Sapien
aagtatgatcagcaatgaggcggtggtcaatatcctgtcgagctcatcac

SEQ ID NO: 1544 - DNA, 50 bp, Homo Sapien
tattcctacatggttcgtgggggccactttgcggcctttgaggagccgga

SEQ ID NO: 1545 - DNA, 50 bp, Homo Sapien
attttcagagcaatctaaaagcgccaaaattcgctatgtttacagtgata

SEQ ID NO: 1546 - DNA, 50 bp, Homo Sapien
ccggcaggagattggtggacctcgctcttataccatcgcagttgcttccc

SEQ ID NO: 1547 - DNA, 50 bp, Homo Sapien
atttatcagagtaacgagaagacaaactccggcactgggtttgctccctg

SEQ ID NO: 1548 - DNA, 50 bp, Homo Sapien
ttattcctcatggactaattatggacaggactgaacgtcttgctcgagat

SEQ ID NO: 1549 - DNA, 50 bp, Homo Sapien
gccccatctaggggagccttgattcccttgttattcaacagcaagtgtga

SEQ ID NO: 1550 - DNA, 50 bp, Homo Sapien
aagcagacgttctgcgaggttcccgacctggaccgaattatccccgtgct

SEQ ID NO: 1551 - DNA, 50 bp, Homo Sapien
aaatgggagagtggttacaacacacgagctacaaactacaatgctggaga

SEQ ID NO: 1552 - DNA, 50 bp, Homo Sapien
gtcagagcctcgagttattaacactaacgatttgttaatgatagctactg

SEQ ID NO: 1553 - DNA, 50 bp, Homo Sapien
caaagtgtaccaacataagtgttggtagcacttaagacttatacttgcct

SEQ ID NO: 1554 - DNA, 50 bp, Homo Sapien
cttctacctacgatggatttgggttagcatgggctatatcagaatacatt

SEQ ID NO: 1555 - DNA, 50 bp, Homo Sapien
accagacggtcgcaggcttagtccaattgcagagaactcgcttcccaggc

SEQ ID NO: 1556 - DNA, 50 bp, Homo Sapien
agctgctcataggcactttataccacagagccttgtattgtgaactctaa

SEQ ID NO: 1557 - DNA, 50 bp, Homo Sapien
tgctgcttggtgaacaatcattaattcttcgatatttctgtagcttgaat

SEQ ID NO: 1558 - DNA, 50 bp, Homo Sapien
acaacaacaccagctatagcaggtgggcacggctcgacctcaatggggct

SEQ ID NO: 1559 - DNA, 50 bp, Homo Sapien
gacagatggtggatggtctggacaagaagcgagtaagccactgcggttgg

SEQ ID NO: 1560 - DNA, 50 bp, Homo Sapien
cccttgagaccccacgtcatgtagagaagttaacggcccaagtggtgggc

SEQ ID NO: 1561 - DNA, 50 bp, Homo Sapien
ataatctttgggtaacttcaaaacggggcagccaaacccatgaggcaatg

SEQ ID NO: 1562 - DNA, 50 bp, Homo Sapien
gccagacccccaaaatcgtgaactttgtctccgtgggacccacatacatg

SEQ ID NO: 1563 - DNA, 50 bp, Homo Sapien
agtacacgacccaggtatgtaccaagtaggcacccttgggcgcacccact

SEQ ID NO: 1564 - DNA, 50 bp, Homo Sapien
acttatgagttggtttttgcaattgagtttccctctgggttgcattgagg

SEQ ID NO: 1565 - DNA, 50 bp, Homo Sapien
cttccacataggaaagactttgacccaatgaggaattagtcattgtcctt

SEQ ID NO: 1566 - DNA, 50 bp, Homo Sapien
tgcttcttgttccttctgcgagctggtattgagcgcctgccacgagccag

SEQ ID NO: 1567 - DNA, 50 bp, Homo Sapien
atataccttcaagcaaccctttggattatgcccatgaacaagttagtttc

SEQ ID NO: 1568 - DNA, 50 bp, Homo Sapien
aacctggccttcagtgtaccgcgtctaccctgggattcaggaaaaggcct

SEQ ID NO: 1569 - DNA, 50 bp, Homo Sapien
gggcagctggttaggtagagggagttgtcaagtcttgctggcccagccaa

SEQ ID NO: 1570 - DNA, 50 bp, Homo Sapien
taagaagaactgtgcggcacagcgcccgctactacagctcgtcacacggt

SEQ ID NO: 1571 - DNA, 50 bp, Homo Sapien
aagtggaaccacttcaggtactacccgtcttctatctgggcacacgtgtt

SEQ ID NO: 1572 - DNA, 50 bp, Homo Sapien
cctcaggatttgcggagcctgtaataattgagggacaggcggggcgccat

SEQ ID NO: 1573 - DNA, 50 bp, Homo Sapien
gtgtctgtaatcgccctactattcagtggcgagaaataaagtttgcttag

SEQ ID NO: 1574 - DNA, 50 bp, Homo Sapien
gactttgtgacttaggcggctgtgttgcctatgtagagaacacgcttcac

SEQ ID NO: 1575 - DNA, 50 bp, Homo Sapien
ttgatcaactatgatggcctattacgagtggcacatctctatataatggg

SEQ ID NO: 1576 - DNA, 50 bp, Homo Sapien
ggtggtgccagtggcttattaattccgatactagtttgctttgctgacca

SEQ ID NO: 1577 - DNA, 50 bp, Homo Sapien
ttgtagtccctcacttggatatacctctgttttcacgatagaaataaggg

SEQ ID NO: 1578 - DNA, 50 bp, Homo Sapien
cactaaaataagatcatgttttaattgtgagaaacagggccgagcacagt

SEQ ID NO: 1579 - DNA, 50 bp, Homo Sapien
gatgttacagttcctaatttgaaaccactgactgtatattgtgtgaaagc

SEQ ID NO: 1580 - DNA, 50 bp, Homo Sapien
tatcaagagacatggtattgactcaacagtttccagtcatggccaaatgt

SEQ ID NO: 1581 - DNA, 50 bp, Homo Sapien
ggataacacactgcaagtggacatcaacgggttcactaccggccgccgag

SEQ ID NO: 1582 - DNA, 50 bp, Homo Sapien
gaactcgccataaggcattgatcaggattatggtttcccgttctgaaatt

SEQ ID NO: 1583 - DNA, 50 bp, Homo Sapien
agaacggcttcctcccaattcacctgttgggcctccgagtggactgggat

SEQ ID NO: 1584 - DNA, 50 bp, Homo Sapien
agaaggtcgtctggactgtgttccgggagcccattcagcttcacagagaa

SEQ ID NO: 1585 - DNA, 50 bp, Homo Sapien
aaaggcactgccaaccccatttcacagaccgcaaaccgaggcgcgaggaa

SEQ ID NO: 1586 - DNA, 50 bp, Homo Sapien
gtaaatgtggttgcattgtcaatagggacgctaaagttcaggccaccttt

SEQ ID NO: 1587 - DNA, 50 bp, Homo Sapien
atggacggtatcaccgtgactgtggccgacctgttctttgcggggacaga

SEQ ID NO: 1588 - DNA, 50 bp, Homo Sapien
tcaggggttacctccatgtgccctttttagggaagctgttggagaaaata

SEQ ID NO: 1589 - DNA, 50 bp, Homo Sapien
caccggacggagaacatgatgaacgacgcacatggcatagcaacgacgaa

SEQ ID NO: 1590 - DNA, 50 bp, Homo Sapien
tggtgccggggcgacaaggtcgcaactataatctaaccgccttgctgctc

SEQ ID NO: 1591 - DNA, 50 bp, Homo Sapien
attagaagattttacaggacgagggctctacctctcagacatcccaattc

SEQ ID NO: 1592 - DNA, 50 bp, Homo Sapien
aactctcagaaaacgctccagtaagatctacttccggaatccaatggcag

SEQ ID NO: 1593 - DNA, 50 bp, Homo Sapien
tatctatacatccgtatcttttaatgatccgtgtgtaccatctttgtgat

SEQ ID NO: 1594 - DNA, 50 bp, Homo Sapien
actgtagcaatacctttaaaatatgaggttaagctgactgttcatgggtt

SEQ ID NO: 1595 - DNA, 50 bp, Homo Sapien
ccaaaatgtcgtgcaccgattgttccatgcctcatatggggcccgtaggg

SEQ ID NO: 1596 - DNA, 50 bp, Homo Sapien
ttaaccttggtcagcactcggcacacccctgcgcggtgcacataacagca

SEQ ID NO: 1597 - DNA, 50 bp, Homo Sapien
tgaaacgtgtgaaccgtaaacgcattgagctgacacgaaaagtcctgttt

SEQ ID NO: 1598 - DNA, 50 bp, Homo Sapien
acctccagccagaagtcccttccaaatataagagtactcatgtttattta

SEQ ID NO: 1599 - DNA, 50 bp, Homo Sapien
gtgggtgatgacgtaggacatgtgcttggtacaaaaagggcctgagacat

SEQ ID NO: 1600 - DNA, 50 bp, Homo Sapien
gggcaaatacactacgaacaacagctcagaacaacgtgtctctctggaca

SEQ ID NO: 1601 - DNA, 50 bp, Homo Sapien
tgataactgcaaaggggagcttggaattatgttagtcagtccctgtgaat

SEQ ID NO: 1602 - DNA, 50 bp, Homo Sapien
gggcttttcaagattctgctaagatctgtattaatcatcttgtgcatggg

SEQ ID NO: 1603 - DNA, 50 bp, Homo Sapien
ttctgccacatcacgcagagctagtgatcgagtttgcacaattacaccaa

SEQ ID NO: 1604 - DNA, 50 bp, Homo Sapien
gtgaaccctccacggtggaaaaaatgccgcccttagtcgggtggggaaaa

SEQ ID NO: 1605 - DNA, 50 bp, Homo Sapien
gctggcttaacctatgagaagttctatctgacgatcagcttggaacagcc

SEQ ID NO: 1606 - DNA, 50 bp, Homo Sapien
gtatgcacgtacaaatttcttaacctgttatcaatgtctgagctacataa

SEQ ID NO: 1607 - DNA, 50 bp, Homo Sapien
gcgtatcagaggtagcggagaatgaagagcgacaagtgggacgagctgta

SEQ ID NO: 1608 - DNA, 50 bp, Homo Sapien
aggaagacgagacgactagaagcacacaataagacgacaaccagacacaa

SEQ ID NO: 1609 - DNA, 50 bp, Homo Sapien
tagcccatatattcatgtgtcatcgttcaggaacaagtcagtgacaaact

SEQ ID NO: 1610 - DNA, 50 bp, Homo Sapien
cgcacatttgcatactatatgcttgttacagtgatccccacagtaactca

SEQ ID NO: 1611 - DNA, 50 bp, Homo Sapien
caatactttaattgtaagaggagttccacatcattacatcaacagtgtga

SEQ ID NO: 1612 - DNA, 50 bp, Homo Sapien
agtaacggtgccacgtggataccaatgcacacgcccctagagtccaccct

SEQ ID NO: 1613 - DNA, 50 bp, Homo Sapien
tctgctgatacacaggtaggatgggacccttcatgaatatctgactttaa

SEQ ID NO: 1614 - DNA, 50 bp, Homo Sapien
aatgctgtatcaagggtgggcttagctgtgcctttccaataaagatgtga

SEQ ID NO: 1615 - DNA, 50 bp, Homo Sapien
tggtgaaggacagccagtatgagatggacagcgagttcgagggggagttg

SEQ ID NO: 1616 - DNA, 50 bp, Homo Sapien
ccttgatgagaagttcctaccactgtgcaatgaataacgaaaatgccaga

SEQ ID NO: 1617 - DNA, 50 bp, Homo Sapien
tctcccccaactgatatgttcatagaatgacagtttgtagatagaagatc

SEQ ID NO: 1618 - DNA, 50 bp, Homo Sapien
gcaaaactctctcattgaaagcgttcacatagttcctaatgtttctttat

SEQ ID NO: 1619 - DNA, 50 bp, Homo Sapien
tattctttggttctgctcccccactattgaccaatgtatgagatgggaag

SEQ ID NO: 1620 - DNA, 50 bp, Homo Sapien
tgtattgtttggcaccaatatataaactgcttcacccttcaggatcttct

SEQ ID NO: 1621 - DNA, 50 bp, Homo Sapien
tgagaagaattatcgtattccacgtttttagccctcaggttaccaagata

SEQ ID NO: 1622 - DNA, 50 bp, Homo Sapien
gatagagacaatcttacccgcaggttttcagatctaggatttgaagtgaa

SEQ ID NO: 1623 - DNA, 50 bp, Homo Sapien
ggaggagttgtgtggggtaatgacaatctcggactctccaagagaacagg

SEQ ID NO: 1624 - DNA, 50 bp, Homo Sapien
accagtatcgctcatagatcagcaaaccggggcctactagagtctgaaca

SEQ ID NO: 1625 - DNA, 50 bp, Homo Sapien
gactggatataccctggaaagtcttaagccttgtctcatggaccttcacc

SEQ ID NO: 1626 - DNA, 50 bp, Homo Sapien
ttgaactaaatatccagcagatacaacaagtagtcagaagttcaaagatg

SEQ ID NO: 1627 - DNA, 50 bp, Homo Sapien
cgcaaagaggcaagcgcaagacgacaggaaacgaagcgagagacgagaag

SEQ ID NO: 1628 - DNA, 50 bp, Homo Sapien
tcccataaacaaatgtaatgggcatattgggactcgtatgtaggaatcaa

SEQ ID NO: 1629 - DNA, 50 bp, Homo Sapien
ttaaagccttctggatccatggggggagaagtgatatggtgaagggaagt

SEQ ID NO: 1630 - DNA, 50 bp, Homo Sapien
ggaggagcaaagactggggtcttttgcgaaagggattgcaggttcagaag

SEQ ID NO: 1631 - DNA, 50 bp, Homo Sapien
aggatgcttttactacccagtggcttgtaagagacctgcgaggcaaatca

SEQ ID NO: 1632 - DNA, 50 bp, Homo Sapien
atattggttgacttccggctttctaagggtgatggattggagttcaagag

SEQ ID NO: 1633 - DNA, 50 bp, Homo Sapien
gtgcgccccacagtagacgtgcagacgtccctgagaggttcttgaagatg

SEQ ID NO: 1634 - DNA, 50 bp, Homo Sapien
ggaacatagaactcatgacggaagagttgagacctaacgagaaatagaaa

SEQ ID NO: 1635 - DNA, 50 bp, Homo Sapien
agtgttatttatgctcccttcgtgggtgatggccacgccctcaccatgtc

SEQ ID NO: 1636 - DNA, 50 bp, Homo Sapien
ataaggatgtctaccaaatgtccgacagccagctctatgaagcctttacc

SEQ ID NO: 1637 - DNA, 50 bp, Homo Sapien
agcactcccaagtctacagagtgatagccttccgtaacccaactctcctg

SEQ ID NO: 1638 - DNA, 50 bp, Homo Sapien
gaccggagtaccttgcgtgcagttatgtcggcgtcggtagtgtctgtcat

SEQ ID NO: 1639 - DNA, 50 bp, Homo Sapien
gaccgggctgcattgtgtatggtgccacctagagatccacgatgactgcc

SEQ ID NO: 1640 - DNA, 50 bp, Homo Sapien
ctgcagacccaagacctcgtgaagtcggtccaggccacgactgagaacaa

SEQ ID NO: 1641 - DNA, 50 bp, Homo Sapien
attggaccgacataggaccgtccggatgcaactctccccgtacaaccctg

SEQ ID NO: 1642 - DNA, 50 bp, Homo Sapien
aagtgtctagagtcatgtgagcctcgtgtcatctccggggtggccacagg

SEQ ID NO: 1643 - DNA, 50 bp, Homo Sapien
ctaggaccctcacgaacggacaacacagaagcgcaacgcgcaacacacaa

SEQ ID NO: 1644 - DNA, 50 bp, Homo Sapien
gcagcccatgggtatgacataggccaaggcccaactaacagtcaagaaac

SEQ ID NO: 1645 - DNA, 50 bp, Homo Sapien
aggcaacctgacggagacctacgttcaggaccgtggcgatggcatgtaca

SEQ ID NO: 1646 - DNA, 50 bp, Homo Sapien
ccgtgagctgtctgactacctgcttcaagattacccagtcaccgtggcct

SEQ ID NO: 1647 - DNA, 50 bp, Homo Sapien
tgtaatggtctctgaaaaggaattgagaagtaattcctctgattctgttt

SEQ ID NO: 1648 - DNA, 50 bp, Homo Sapien
tcacagatgccttctctaagacagctcctgtgtacagcatcgttctttgc

SEQ ID NO: 1649 - DNA, 50 bp, Homo Sapien
ctacgagacggtgcccatcaatctcataaaggatgggggccaacagtttt

SEQ ID NO: 1650 - DNA, 50 bp, Homo Sapien
tataatggagaaagattttgttatggatgtcagggggaattgaaagacca

SEQ ID NO: 1651 - DNA, 50 bp, Homo Sapien
tttaccctcgcgcgctgattatccaccctgggcgagggataccgatgtgt

SEQ ID NO: 1652 - DNA, 50 bp, Homo Sapien
taccagtcccgacactaactatactctctactattggcacagaagcctgg

SEQ ID NO: 1653 - DNA, 50 bp, Homo Sapien
atgggagccgctgccgtctttgaataccctgggaactgagtgaggtccca

SEQ ID NO: 1654 - DNA, 50 bp, Homo Sapien
gaaacatcgtttcaaggagcgagattgacttaaatcttatcaaatgtcac

SEQ ID NO: 1655 - DNA, 50 bp, Homo Sapien
ctgagatgctggacaaatcgcccatcagatacatccctcaggtgaagaca

SEQ ID NO: 1656 - DNA, 50 bp, Homo Sapien
gacgtctatgcctacggggttgtgctctacgagcttatgactggctcact

SEQ ID NO: 1657 - DNA, 50 bp, Homo Sapien
cccaccccagagctatgccaacaaaatctgttacggagtaaagccctgaa

SEQ ID NO: 1658 - DNA, 50 bp, Homo Sapien
ggctgagaaacagtagctatcaaacgccggctgtgagccacgtctgtgct

SEQ ID NO: 1659 - DNA, 50 bp, Homo Sapien
aggaggattagcttggagttctctatactcaggtacctctttcagggttt

SEQ ID NO: 1660 - DNA, 50 bp, Homo Sapien
caccttactggggcttagtactccggatgaccgtgcgaggtcactgttac

SEQ ID NO: 1661 - DNA, 50 bp, Homo Sapien
ataagctatagacccgaggaaactcagagtcggaacggagaaaggtggac

SEQ ID NO: 1662 - DNA, 50 bp, Homo Sapien
cactcccagtgcttgcaagattccaagttctcacctcttaaagaaaaccc

SEQ ID NO: 1663 - DNA, 50 bp, Homo Sapien
aatttagctatagtctagaaagttagtcgaagttaactagggagggtgtg

SEQ ID NO: 1664 - DNA, 50 bp, Homo Sapien
actattgcaaaacgggtgtattatccaggtactcgtacactatttttttg

SEQ ID NO: 1665 - DNA, 50 bp, Homo Sapien
agactgcagaggaatgacgaaagcgacgggccagttgacgacgcgaagag

SEQ ID NO: 1666 - DNA, 50 bp, Homo Sapien
caggaaagtacccctcctggactttttacatccaggtcatgacatttaat

SEQ ID NO: 1667 - DNA, 50 bp, Homo Sapien
cgctttattggctgagatatgaacatattgttgaaaggtaatttgagaga

SEQ ID NO: 1668 - DNA, 50 bp, Homo Sapien
cagcagtaccgtcaggaccaacgtgacggatccaagtcggaggatgaact

SEQ ID NO: 1669 - DNA, 50 bp, Homo Sapien
agccacacatctccataaagatgtaagaggtaattatttcagctgggtgc

SEQ ID NO: 1670 - DNA, 50 bp, Homo Sapien
caatgcatatcattcagacataaagatgggccgaagtacagatacatgct

SEQ ID NO: 1671 - DNA, 50 bp, Homo Sapien
tcttctgtgtggtgagtggaccgcttaccccactaggtgaagatgtcagc

SEQ ID NO: 1672 - DNA, 50 bp, Homo Sapien
attcaacaatctaaccatactgagctgctgattccccagggattgcatat

SEQ ID NO: 1673 - DNA, 50 bp, Homo Sapien
ctaggtcgcacagggcatagacgatagtaccattcctggttgaaacacga

SEQ ID NO: 1674 - DNA, 50 bp, Homo Sapien
tctccagaagtattgctggggtcagctcgttactcaactccagttgacat

SEQ ID NO: 1675 - DNA, 50 bp, Homo Sapien
atgacgtggcaccaaccatcatcccgacacccatgtaccgtcctaggcca

SEQ ID NO: 1676 - DNA, 50 bp, Homo Sapien
acttggtgctatgagccctccaagtattaaccttacacagagcccccgct

SEQ ID NO: 1677 - DNA, 50 bp, Homo Sapien
ctgcatgacggagccgagccatgtgtctttacacctcgctgttgtcacat

SEQ ID NO: 1678 - DNA, 50 bp, Homo Sapien
agccttcctacacgttagatttgccgtaccaatctctgaatgccccataa

SEQ ID NO: 1679 - DNA, 50 bp, Homo Sapien
ttaggtccaccatacgatctgtgtaagtaagattatcccacttgcccttt

SEQ ID NO: 1680 - DNA, 50 bp, Homo Sapien
tgcaaggggcgtgggagtggcctgaagagtcctctgaatgaaccttctgg

SEQ ID NO: 1681 - DNA, 50 bp, Homo Sapien
gtatcaatgtagagttgctctgttttcttcaactgtatttattgctgcat

SEQ ID NO: 1682 - DNA, 50 bp, Homo Sapien
actggctaggggtgtcaatgcatcagccgtagtgaacgtcactgtgaggg

SEQ ID NO: 1683 - DNA, 50 bp, Homo Sapien
tgagagtgtgaccaaaagttacatgtttgcacctttctagttgaaaataa

SEQ ID NO: 1684 - DNA, 50 bp, Homo Sapien
ttactttcttaatgtgacctagcaataggcatagctacgtggcactatat

SEQ ID NO: 1685 - DNA, 50 bp, Homo Sapien
cttaacaaaggttaccataagccacaaattcataaccacttatccttcca

SEQ ID NO: 1686 - DNA, 50 bp, Homo Sapien
aacacgacagccaacgtgcataagcatgcaacactaccgaggtagccaca

SEQ ID NO: 1687 - DNA, 50 bp, Homo Sapien
gcaaacctacagtatgacgatggcagcggtatgaagcgagaggccactgc

SEQ ID NO: 1688 - DNA, 50 bp, Homo Sapien
agtagtgattagtcgtatttcgcgacacctcacacggtagatgtgatcaa

SEQ ID NO: 1689 - DNA, 50 bp, Homo Sapien
ctcttgatggagccagatccccatcctatagttcatagtcctctcctggt

SEQ ID NO: 1690 - DNA, 50 bp, Homo Sapien
gaatataccattcctattactgtaaaagacagggccggccaagctgcaac

SEQ ID NO: 1691 - DNA, 50 bp, Homo Sapien
ccaaggggttttacttaggacaagttgtaccttgccctctctccagctct

SEQ ID NO: 1692 - DNA, 50 bp, Homo Sapien
taaacacattgaatgcgctttattgcccatgggatatgtggtgtatatcc

SEQ ID NO: 1693 - DNA, 50 bp, Homo Sapien
gattatatattccgcacttaaggattaaccaggtcgtccaagcaaaaaca

SEQ ID NO: 1694 - DNA, 50 bp, Homo Sapien
atgtgctattaagagcacgtatccattattcttctcaacccaagaacctg

SEQ ID NO: 1695 - DNA, 50 bp, Homo Sapien
acccgagtttagtaacagtgcagattccacgttcttgttccgatactctg

SEQ ID NO: 1696 - DNA, 50 bp, Homo Sapien
gaaagcaaagcactggtacagttatttaacaggcatacacaagcagggaa

SEQ ID NO: 1697 - DNA, 50 bp, Homo Sapien
tacccgtatgagacctacgagccttacccctatggggtggatgaagggcc

SEQ ID NO: 1698 - DNA, 50 bp, Homo Sapien
ctcctagttccacgtgctatcattctactaactggcaccctaaggttgaa

SEQ ID NO: 1699 - DNA, 50 bp, Homo Sapien
aaaagcccctttggtgtgaaaaacggcccccacaagtttataaaaggggg

SEQ ID NO: 1700 - DNA, 50 bp, Homo Sapien
ccaagaagcgcctgattgtcagtaaacgggcaggtactcagtgcaccaac

SEQ ID NO: 1701 - DNA, 50 bp, Homo Sapien
cttctggcgtaaaaacattctcgagttaataatgttaccccttataacag

SEQ ID NO: 1702 - DNA, 50 bp, Homo Sapien
aagtcaaataactcctcattgtaaacaaactgtgtaactgcccaaagcag

SEQ ID NO: 1703 - DNA, 50 bp, Homo Sapien
ttattgacgcccagcgcgcctcgcctcttcacccatcaacgctgtgcttt

SEQ ID NO: 1704 - DNA, 50 bp, Homo Sapien
ggagcatggactttggaaccagaattctaggtgcgagtctcagctgtgtg

SEQ ID NO: 1705 - DNA, 50 bp, Homo Sapien
tcttacagttgatgcaaagtatcaactactttaccctaccttctcccctt

SEQ ID NO: 1706 - DNA, 50 bp, Homo Sapien
ttaatcctttaactctgcggatagcatttggtaggtagtgattaactgtg

SEQ ID NO: 1707 - DNA, 50 bp, Homo Sapien
gatgttcttgaggtgaattccctgcagtgtctgcaagcactggcagcgca

SEQ ID NO: 1708 - DNA, 50 bp, Homo Sapien
cttagtgactagttttcgctagacagcaggttaatacctagatctcattt

SEQ ID NO: 1709 - DNA, 50 bp, Homo Sapien
gaagtgggatttacccattaccatatattcaccaccaggtcactgacgag

SEQ ID NO: 1710 - DNA, 50 bp, Homo Sapien
gcgaggacggggctttgtagaatgctcgctggtggtagctgttgttcctc

SEQ ID NO: 1711 - DNA, 50 bp, Homo Sapien
ggtgcgctctgttgtaaggccctggataaaagatcgcttcatggccccgg

SEQ ID NO: 1712 - DNA, 50 bp, Homo Sapien
caatccacaatctgacattctcaggaagcccccaagttgatatttctatt

SEQ ID NO: 1713 - DNA, 50 bp, Homo Sapien
cacatgggagatctagatgtagaaggtacacaagtagtaggataactcac

SEQ ID NO: 1714 - DNA, 50 bp, Homo Sapien
cagactgcaaatctgcctgataggacccatattcccacagcactaattca

SEQ ID NO: 1715 - DNA, 50 bp, Homo Sapien
ctgtgcaaaggttgagagctattgctgattagttaccacagttctgatga

SEQ ID NO: 1716 - DNA, 50 bp, Homo Sapien
ggtagcacagcaaacttgtaggaattagtatcaatagtaaattttgggtt

SEQ ID NO: 1717 - DNA, 50 bp, Homo Sapien
ttggggccctagtggtggggctacaaggcttgctcctagatctactccaa

SEQ ID NO: 1718 - DNA, 50 bp, Homo Sapien
tgtcagcgccgttaaccccagttataacggaggggagcctaagcgctctc

SEQ ID NO: 1719 - DNA, 50 bp, Homo Sapien
tccttccaatgaaatctcaggaataattaaactctagggggactttctta

SEQ ID NO: 1720 - DNA, 50 bp, Homo Sapien
aagaagctgcgtccgtcgtcactctcggtagcatttagctgaagttgagc

SEQ ID NO: 1721 - DNA, 50 bp, Homo Sapien
ttggacctgcagatcgccctggactcgcatcccactattgtcagcctgca

SEQ ID NO: 1722 - DNA, 50 bp, Homo Sapien
ctatagaggccgattatcgaagccggtacgtaaagacagcgcaagaagag

SEQ ID NO: 1723 - DNA, 50 bp, Homo Sapien
gaacctgtcgtgcaaagctcacgtcaccaactgctgcagttatctcctga

SEQ ID NO: 1724 - DNA, 50 bp, Homo Sapien
cacgtgaactatgcaatttaaagggttgacccacactagacgaaactgga

SEQ ID NO: 1725 - DNA, 50 bp, Homo Sapien
taaatgaatctcgttcccaaagaactacccccttttcagctgagccctgg

SEQ ID NO: 1726 - DNA, 50 bp, Homo Sapien
ctgaaacctatcgaataatcgggccgagccgcagagcacaagggaaccag

SEQ ID NO: 1727 - DNA, 50 bp, Homo Sapien
agggaactttctatgcaatgttcaggataaatcgatactgctggccaatc

SEQ ID NO: 1728 - DNA, 50 bp, Homo Sapien
attgtgctggtccgcgtgaagaacaagaccgactacacgggccctgagag

SEQ ID NO: 1729 - DNA, 50 bp, Homo Sapien
ttgcggccccgaaacttgtgcgcgcagcccaaactaacctcacgtgaagt

SEQ ID NO: 1730 - DNA, 50 bp, Homo Sapien
tacacgactacaaactcctgaaaccgagcctggcggtcaacctggccgac

SEQ ID NO: 1731 - DNA, 50 bp, Homo Sapien
gccagtgatagtagttaccttgcagggtcgttgtcaggttatgtgagaaa

SEQ ID NO: 1732 - DNA, 50 bp, Homo Sapien
aagacccagaccgtcatgtacgaccttgtatcggagctgcacgctcagca

SEQ ID NO: 1733 - DNA, 50 bp, Homo Sapien
acaggaagatcactacaacaatttgtctgctccaaggtctctgaggcagc

SEQ ID NO: 1734 - DNA, 50 bp, Homo Sapien
gtaggtaggttaacataagatgcctccgtgagaggctggtggtcagccct

SEQ ID NO: 1735 - DNA, 50 bp, Homo Sapien
catattgaaatgtacggaatttgatccatgcgatactatgtgtgcattat

SEQ ID NO: 1736 - DNA, 50 bp, Homo Sapien
ggcagcatgagtggttaagagtcaagggagtagccggggtagtggcttac

SEQ ID NO: 1737 - DNA, 50 bp, Homo Sapien
ttgtaaaacgtgatggatttccactatgggttgggctctcaagtcatgat

SEQ ID NO: 1738 - DNA, 50 bp, Homo Sapien
tccccgtgtgtaggtagatctggtctttagaggcagatagataggtcagt

SEQ ID NO: 1739 - DNA, 50 bp, Homo Sapien
tgttaactgggcctatgtagtagcctcatttaccatcgtttgtattactg

SEQ ID NO: 1740 - DNA, 50 bp, Homo Sapien
taggaacttttcacttatctcatgttagctgtaccagtcagtgattaagt

SEQ ID NO: 1741 - DNA, 50 bp, Homo Sapien
gaagaagttcatcagtcagatcgtggatacgctggacgtgtcagacaagc

SEQ ID NO: 1742 - DNA, 50 bp, Homo Sapien
gctgccaaccctgtctacggcaggtatgaccagtataagactccaatgga

SEQ ID NO: 1743 - DNA, 50 bp, Homo Sapien
ccacatgtcccagatcgtctccaattcgaaaacaaccgtcctgctgtccc

SEQ ID NO: 1744 - DNA, 50 bp, Homo Sapien
aagttgaatctctcgactcagaagattatagccttagtgaagaaggacaa

SEQ ID NO: 1745 - DNA, 50 bp, Homo Sapien
tagtatgggtttctaatcctaggcttgtacaatggattggagttgagcca

SEQ ID NO: 1746 - DNA, 50 bp, Homo Sapien
gcgcgcatggctgaaatcctaggcgagaagaaagattcttctgcctgata

SEQ ID NO: 1747 - DNA, 50 bp, Homo Sapien
atgtttgagcgacacacacgtgtaacactgcatcggatgcggggcgtgga

SEQ ID NO: 1748 - DNA, 50 bp, Homo Sapien
caaagagcccgcagcgatgaaacgagactgaggcggcgaacaaacagaaa

SEQ ID NO: 1749 - DNA, 50 bp, Homo Sapien
ttttccccgcaccccctaataatcgctcgccttatatgtcccccccgcac

SEQ ID NO: 1750 - DNA, 50 bp, Homo Sapien
tattggctgccatgatagggttctcacagcgtcatccatgatcgtaaggg

SEQ ID NO: 1751 - DNA, 50 bp, Homo Sapien
tatcagcatgccactcgacttcaagcaccgcatcaccgtgcaggcctcac

SEQ ID NO: 1752 - DNA, 50 bp, Homo Sapien
cgtgtgacagtaagctaacctttgatgctataactacgattcggggagaa

SEQ ID NO: 1753 - DNA, 50 bp, Homo Sapien
ttttatgttattacagggcattcaaatgggctgctgcttagcttgcacct

SEQ ID NO: 1754 - DNA, 50 bp, Homo Sapien
tctctgcagctatcctaattcagccagtaaggttcagtcttcttgctcag

SEQ ID NO: 1755 - DNA, 50 bp, Homo Sapien
ctcgtggcaaggaggtctcagacttgatccgcagtggaaaacccatcaag

SEQ ID NO: 1756 - DNA, 50 bp, Homo Sapien
tcctctccagctataacagtagggatgagtacccaaaagctcagccagcc

SEQ ID NO: 1757 - DNA, 50 bp, Homo Sapien
gagatgaatgtgcgtccagaacagccgcagttctcacccatgccagggaa

SEQ ID NO: 1758 - DNA, 50 bp, Homo Sapien
catctgttctatgcttcctcgtgccaattatagtttgacagggccttaaa

SEQ ID NO: 1759 - DNA, 50 bp, Homo Sapien
tcctgtcggagccctgtctcctctctctgtaataaactcatttctagcag

SEQ ID NO: 1760 - DNA, 50 bp, Homo Sapien
ttagtggttgtgaatggtgcgtgtgagatctgcatcctggcgtcaggcct

SEQ ID NO: 1761 - DNA, 50 bp, Homo Sapien
tcatgacacgcgcccaccctatgcgcgttttcacaaactccgaagaacgc

SEQ ID NO: 1762 - DNA, 50 bp, Homo Sapien
actcttggtattaccctcctaatagtcatactagtagtcatactccctgg

SEQ ID NO: 1763 - DNA, 50 bp, Homo Sapien
ctgaacacgtgcggacaacgacacgcttcgcgcgctgttggatgtaacca

SEQ ID NO: 1764 - DNA, 50 bp, Homo Sapien
agggagataactgtgtgttcgatggggtcatctaccgcagtggagagaaa

SEQ ID NO: 1765 - DNA, 50 bp, Homo Sapien
aataaactcgtgggctggcggtggatacggatagacacgtcctgtgtgtg

SEQ ID NO: 1766 - DNA, 50 bp, Homo Sapien
gaggtcattgagtgcattacccaaggtcgtgttttggagcggccccgagt

SEQ ID NO: 1767 - DNA, 50 bp, Homo Sapien
tcgccgtagacagcgctctggctaccaccgtgaggctacttgaactgtca

SEQ ID NO: 1768 - DNA, 50 bp, Homo Sapien
ccttctcatgctctgaggtactactgcctctgcagcacaaatttctattt

SEQ ID NO: 1769 - DNA, 50 bp, Homo Sapien
ctgcccaagcaaatgcattataatcataagtgatccagtatttcttctct

SEQ ID NO: 1770 - DNA, 50 bp, Homo Sapien
gatatcattacactacgggccgaacgatcacgcggataccttggcgctag

SEQ ID NO: 1771 - DNA, 50 bp, Homo Sapien
gttcaggcgttcttctcctagacaactataccgatcgcattcaggtcctt

SEQ ID NO: 1772 - DNA, 50 bp, Homo Sapien
ttccctcgtccgtctgtctcgatgcctgattcggacggccaatggtgctt

SEQ ID NO: 1773 - DNA, 50 bp, Homo Sapien
agtgggttctcaatacggtaccaaagatataatcacctaggtttacaaat

SEQ ID NO: 1774 - DNA, 50 bp, Homo Sapien
atcaggacgcactttccggctccagtgacctgctcgaacttctgctgcaa

SEQ ID NO: 1775 - DNA, 50 bp, Homo Sapien
gggaggtggtcttcacacacaggcactgcaggtccccatcttcttcagct

SEQ ID NO: 1776 - DNA, 50 bp, Homo Sapien
ttcatgtgtcattgactccgaccttcagttacccatgcttttagctgcca

SEQ ID NO: 1777 - DNA, 50 bp, Homo Sapien
ttctgctgaatgccgcgatgggtcaggtaggggggaaacaggttgggatg

SEQ ID NO: 1778 - DNA, 50 bp, Homo Sapien
aatttcagtgtggccaaaagactctgaggccccgctttaagattattggg

SEQ ID NO: 1779 - DNA, 50 bp, Homo Sapien
ccatgaatcaatgtctggtagccaccggcactcacgaaccgaaaaaccaa

SEQ ID NO: 1780 - DNA, 50 bp, Homo Sapien
tccgacagaaagaggtctatatcagagagtagtcgatcaggcaaaagatc

SEQ ID NO: 1781 - DNA, 50 bp, Homo Sapien
gaagtgatcgggaaaggaacccattgcaaccaagtcgaagtgatagccac

SEQ ID NO: 1782 - DNA, 50 bp, Homo Sapien
taagtaacttgactataaaataaagccgtccgtgggacgactgacctcgt

SEQ ID NO: 1783 - DNA, 50 bp, Homo Sapien
gggcgattcaacctgtgtgctgcgaaggacgagacttcctcttgaacagt

SEQ ID NO: 1784 - DNA, 50 bp, Homo Sapien
tgaccatctgtggtaaccgagaattccttggaggcagcgtcttcaccgcc

SEQ ID NO: 1785 - DNA, 50 bp, Homo Sapien
atgcactggggtaccacatggtccatttcatgtgatctattactctgaca

SEQ ID NO: 1786 - DNA, 50 bp, Homo Sapien
gttggaaaagaatcatgggtctcaagatcaaatgaattggaatttgcatt

SEQ ID NO: 1787 - DNA, 50 bp, Homo Sapien
agtgcttctaccaacatgtcccgtggttccagcgccggttttgaccgcca

SEQ ID NO: 1788 - DNA, 50 bp, Homo Sapien
aatatcagctataaatatcgagaggacttgtctgcacatctcatggtagc

SEQ ID NO: 1789 - DNA, 50 bp, Homo Sapien
ggattctgtaatgttcctccatacagttaaaacatcctaacttgtttttc

SEQ ID NO: 1790 - DNA, 50 bp, Homo Sapien
ttgcttacttcccccttctaaacaacaatcccaacccttacgccatggtg

SEQ ID NO: 1791 - DNA, 50 bp, Homo Sapien
cacaacctgaacctaggagtgccccattcttttgtaatttaaatggctgc

SEQ ID NO: 1792 - DNA, 50 bp, Homo Sapien
ccacaggaattaagttcagatctaaatgtcggtgatacttcccagaattc

SEQ ID NO: 1793 - DNA, 50 bp, Homo Sapien
agaaccagattgaaatgagaacgtattggtgtttgtacagtgaacatgcc

SEQ ID NO: 1794 - DNA, 50 bp, Homo Sapien
ctagggttccagactggttggacttgttcgtctggacgacactggagtgg

SEQ ID NO: 1795 - DNA, 50 bp, Homo Sapien
ccaacataacaatcgtggtaacagaatgcgactgctgatttaccgatgta

SEQ ID NO: 1796 - DNA, 50 bp, Homo Sapien
aggttttagggtcctgcaaaaggctagctcggcactacactagggaattt

SEQ ID NO: 1797 - DNA, 50 bp, Homo Sapien
ttgagctgctccaacactctctaccgaagatcaaccggagcgcttccgag

SEQ ID NO: 1798 - DNA, 50 bp, Homo Sapien
agcagatatgattatctatgttgtggacaatggacaatctgtgcacttcc

SEQ ID NO: 1799 - DNA, 50 bp, Homo Sapien
gcactttcaagtgagctgttgcgtactgtatcatattgtagctattaggg

SEQ ID NO: 1800 - DNA, 50 bp, Homo Sapien
catgtttgtcggaagccaagctaccaattacggggaagatctcacaaaaa

SEQ ID NO: 1801 - DNA, 50 bp, Homo Sapien
tgtgcagataacagcatgataaatgagtcgggaccatcaaacagtactaa

SEQ ID NO: 1802 - DNA, 50 bp, Homo Sapien
agcagtaggcttatgtacacctcttatagaggttgataggactgcttggg

SEQ ID NO: 1803 - DNA, 50 bp, Homo Sapien
agtaacaaaactcgcaaaaattgtcaccacagtggaagccaggtgccttt

SEQ ID NO: 1804 - DNA, 50 bp, Homo Sapien
gacactatagagtgtgtcataaccgagaccggataggggagtagttactt

SEQ ID NO: 1805 - DNA, 50 bp, Homo Sapien
tgtctgtcaaggaaggtgagtggtgaagggtttttacatatatacaagaa

SEQ ID NO: 1806 - DNA, 50 bp, Homo Sapien
gaactcattctatccccaatcagctccttttccgttctgttctgctggga

SEQ ID NO: 1807 - DNA, 50 bp, Homo Sapien
ccccgactgagtttcgggaatgtgactacaacaaattcatgagtgttctg

SEQ ID NO: 1808 - DNA, 50 bp, Homo Sapien
atgactgctgtccgcgactactcgcgttctgatgacacgtctactaaaac

SEQ ID NO: 1809 - DNA, 50 bp, Homo Sapien
gaggcgaggtggccttcccaatgcgcgttattcggggttattgaagaata

SEQ ID NO: 1810 - DNA, 50 bp, Homo Sapien
cttccgcatttctccggtcaaccgcatgtatgccatctgccgcagctacc

SEQ ID NO: 1811 - DNA, 50 bp, Homo Sapien
ctgcgtgctgtgcgactgtttttcgatccgctaggtgtggctgcgactgt

SEQ ID NO: 1812 - DNA, 50 bp, Homo Sapien
tgcatcacgtgagtctgagtttcgttgtgggtatcaccactctctggcca

SEQ ID NO: 1813 - DNA, 50 bp, Homo Sapien
gtatttctccccgtccgggcgctgagtagtgtgggttatggtatgttccc

SEQ ID NO: 1814 - DNA, 50 bp, Homo Sapien
gcagtcgtctttgtcacccgaaagaaccgccaagtgtgtgccaacccaga

SEQ ID NO: 1815 - DNA, 50 bp, Homo Sapien
aacgggcaatcgcctagaaacgatagagacagaacgcatgcgcgcaggcg

SEQ ID NO: 1816 - DNA, 50 bp, Homo Sapien
cacatgtcaattcatctgtgacgagggatattctttgtctggaccagaaa

SEQ ID NO: 1817 - DNA, 50 bp, Homo Sapien
tgcagtatcccaactgcaggtccagtgcaggcaataaatatgtgatggac

SEQ ID NO: 1818 - DNA, 50 bp, Homo Sapien
caaccacggcagggaaaagcggagtacggaacgaccatcgagcacaacag

SEQ ID NO: 1819 - DNA, 50 bp, Homo Sapien
gctagcaatatcgtgtgttgcgcactcgtaaagtgtgttatttcaaccct

SEQ ID NO: 1820 - DNA, 50 bp, Homo Sapien
ttccagtctcctgtgaagccaaaagggaccaggaaccgtgcaaaggaaac

SEQ ID NO: 1821 - DNA, 50 bp, Homo Sapien
agttcccgccagggttctacacaccgtctgcaagtcagtcaagtggatca

SEQ ID NO: 1822 - DNA, 50 bp, Homo Sapien
gaatggggatcacaatggcctatgagatagtctgcctggtcaatgctgag

SEQ ID NO: 1823 - DNA, 50 bp, Homo Sapien
tctctcaacgctgtccaactgggcgtacgagtttgacaagtgggccccct

SEQ ID NO: 1824 - DNA, 50 bp, Homo Sapien
gatgcatcgctgcactcaccctccgtgctgattccgccttagttctccac

SEQ ID NO: 1825 - DNA, 50 bp, Homo Sapien
tgaatcaaagagtatgtctgctcccgtgatctttgatagatccagggaag

SEQ ID NO: 1826 - DNA, 50 bp, Homo Sapien
cagacgtacacccgagtagaagggtttgtgcaggacatgcgtctcatctt

SEQ ID NO: 1827 - DNA, 50 bp, Homo Sapien
caccagattggtgtgtcatttttagaccctttactaggcatttatagatg

SEQ ID NO: 1828 - DNA, 50 bp, Homo Sapien
ctacaaagtttggcccctcccaatggtaagagggacaccccccttccttg

SEQ ID NO: 1829 - DNA, 50 bp, Homo Sapien
aatgccaatgacctagagacacgagaagtccatgtggaggcacacagcag

SEQ ID NO: 1830 - DNA, 50 bp, Homo Sapien
ctaggatcccacaccgtgacaggtggaaccataacaacgaactctccaga

SEQ ID NO: 1831 - DNA, 50 bp, Homo Sapien
agaaaatggtgcttcactaacccgcttccggtccagtcacaatcatcatg

SEQ ID NO: 1832 - DNA, 50 bp, Homo Sapien
agcatgtcacgatgttacaagaacgattccgggagtttgcccgagacacc

SEQ ID NO: 1833 - DNA, 50 bp, Homo Sapien
catgttgaacagcattttagcatggtaagttcccttagctatatgaattt

SEQ ID NO: 1834 - DNA, 50 bp, Homo Sapien
gtaaaccaagctgcgctcctgacataccatgagaatgcggcactgacggg

SEQ ID NO: 1835 - DNA, 50 bp, Homo Sapien
tggccgtacttgtgatttcgatggtacgtgaccctctgctgaagacttgc

SEQ ID NO: 1836 - DNA, 50 bp, Homo Sapien
cagctggctggatgattgggactttaaaacgaccctctttcaggtggatt

SEQ ID NO: 1837 - DNA, 50 bp, Homo Sapien
aagtggtatctgacacactctaaaccccgtgttcaaacgggggccttctg

SEQ ID NO: 1838 - DNA, 50 bp, Homo Sapien
cagagacgtgtacagtggccccccgtgaaagacagaattgtggttttcct

SEQ ID NO: 1839 - DNA, 50 bp, Homo Sapien
ggactgacatttagcgtagctaagtgaaaaggtcatagctgagattcctg

SEQ ID NO: 1840 - DNA, 50 bp, Homo Sapien
tgaattctatccgtgaatcccttagaggtctgtgaattgtaggttaagaa

SEQ ID NO: 1841 - DNA, 50 bp, Homo Sapien
ctgcatcctgacccacgtgtttgtagatcctttcagctattggcgccctg

SEQ ID NO: 1842 - DNA, 50 bp, Homo Sapien
ctttgattgatcactctccctgacatccacctgtatgactttgtcaccaa

SEQ ID NO: 1843 - DNA, 50 bp, Homo Sapien
tcttcacgcgcccaccgccgcaatcgatccccccttattaccttcttacc

SEQ ID NO: 1844 - DNA, 50 bp, Homo Sapien
caaatgctaaactctactgtaatcggggtacggttaattccaagcttagg

SEQ ID NO: 1845 - DNA, 50 bp, Homo Sapien
gtactatatgacttacgggaaaacaccatttcagcagataattaatcaga

SEQ ID NO: 1846 - DNA, 50 bp, Homo Sapien
gccgatctacagtcattcaccgggggtaggagagtcacacaagtacaacc

SEQ ID NO: 1847 - DNA, 50 bp, Homo Sapien
tctgggaccagattccgaagtgggagtgtcatagatcaatcccgtgtcct

SEQ ID NO: 1848 - DNA, 50 bp, Homo Sapien
ttcagctttggatgtggttaccgagtatctgtaacccttgaatttctaga

SEQ ID NO: 1849 - DNA, 50 bp, Homo Sapien
gcatctatgccgatctatgccgatctaagttgagcatcagtatggtgacc

SEQ ID NO: 1850 - DNA, 50 bp, Homo Sapien
ccgccgtccctgtgttatagtacataagaacccttattctcctgtggttc

SEQ ID NO: 1851 - DNA, 50 bp, Homo Sapien
agcactaggactctagcctgcatttaggaagacttgccattttgccaagt

SEQ ID NO: 1852 - DNA, 50 bp, Homo Sapien
cctgtcacttccagcgaggcacacaaaactgaccgtagggatggccacca

SEQ ID NO: 1853 - DNA, 50 bp, Homo Sapien
atggtttggtcgtaggatcagcagggctcgcacttcggtcagcaggaaaa

SEQ ID NO: 1854 - DNA, 50 bp, Homo Sapien
agagtccgccacccaaacgaccccggatagcttacctttcggaggtgaag

SEQ ID NO: 1855 - DNA, 50 bp, Homo Sapien
tacagagttgcttacaatgacggatatgatgagtgaagacgaggggaaaa

SEQ ID NO: 1856 - DNA, 50 bp, Homo Sapien
ggagtgggttgatttcagcacctacagtgtacagtcttgtattaagttgt

SEQ ID NO: 1857 - DNA, 50 bp, Homo Sapien
agaatatcttcacgaacttgaccctcctactccacattgcaacatttcca

SEQ ID NO: 1858 - DNA, 50 bp, Homo Sapien
ggagggaaccttgggtaggtttgagcagggggtatagtgtctgctttgca

SEQ ID NO: 1859 - DNA, 50 bp, Homo Sapien
atgaaggagaccagttggcctgcatgatggagcttctagggatgccacca

SEQ ID NO: 1860 - DNA, 50 bp, Homo Sapien
tcagtgctgtgttcgccttgcttcagcagccacttttcatggcgatggtg

SEQ ID NO: 1861 - DNA, 50 bp, Homo Sapien
gcagtttgggagccacaaaaagcgtagcggtgtgatttctagctcagcct

SEQ ID NO: 1862 - DNA, 50 bp, Homo Sapien
gaggaaattttgtaggaaatttgcatacccgtaaagggagacttttttaa

SEQ ID NO: 1863 - DNA, 50 bp, Homo Sapien
acagactttagtattctctatgtagtgccaagtaggcaaaagctcactca

SEQ ID NO: 1864 - DNA, 50 bp, Homo Sapien
actaatggtgtacgtcactaaaaccagcatcaaaatcccaagttctcata

SEQ ID NO: 1865 - DNA, 50 bp, Homo Sapien
tgccatgttaaatatccctatctgtcggacacctgtatacatataagttt

SEQ ID NO: 1866 - DNA, 50 bp, Homo Sapien
atttcacacaagacttctcccgccgtattggttgcggaccttgcgcggcc

SEQ ID NO: 1867 - DNA, 50 bp, Homo Sapien
gataaaacgccgaacggaacacgaactgcgacactgaaagaacccacccg

SEQ ID NO: 1868 - DNA, 50 bp, Homo Sapien
tgtccgttgtgagcacgatggcgtcatgactggagccaacggggaagtgt

SEQ ID NO: 1869 - DNA, 50 bp, Homo Sapien
ttctggaatgtgctcttctggaagtgagatctgcctgtccgggctgggac

SEQ ID NO: 1870 - DNA, 50 bp, Homo Sapien
tggtagatctaaataccataaatggtggctagctttataggaaaacccat

SEQ ID NO: 1871 - DNA, 50 bp, Homo Sapien
ccatatgatatacctcaccgagcacgtatgatctctctaatagaaagtgg

SEQ ID NO: 1872 - DNA, 50 bp, Homo Sapien
gatttcctgtagtgaatcaggcaccggagtgcaggttcgggggtggaatc

SEQ ID NO: 1873 - DNA, 50 bp, Homo Sapien
acattgtaagatccatctacacagtcgttgtccgacttcacttgatacta

SEQ ID NO: 1874 - DNA, 50 bp, Homo Sapien
gtaggttagatgctattaagaaggcacttaatagtacatcatgtaagatg

SEQ ID NO: 1875 - DNA, 50 bp, Homo Sapien
tagactcatctagcaccaactaccattagcactatgttaggagctgcaag

SEQ ID NO: 1876 - DNA, 50 bp, Homo Sapien
agaggactgaccatattaaagagttagggctactaacctcaaaaagtttc

SEQ ID NO: 1877 - DNA, 50 bp, Homo Sapien
gagcaagcccctaggaatctgcctgataatcgattgcattggcaatgaga

SEQ ID NO: 1878 - DNA, 50 bp, Homo Sapien
ggtcataaccccctaaaatccatcatgcaaccttattaatctgtcttggg

SEQ ID NO: 1879 - DNA, 50 bp, Homo Sapien
cacatgtgaactttttctaggtggcaggacaaatcgcgcccatttagagg

SEQ ID NO: 1880 - DNA, 50 bp, Homo Sapien
ttcgtggcactccacaacagatagactatgctcggcaactcatagaagaa

SEQ ID NO: 1881 - DNA, 50 bp, Homo Sapien
tgagtgagcttcataaagcgtaccttgatataccccatcgacctcagcaa

SEQ ID NO: 1882 - DNA, 50 bp, Homo Sapien
cacgtagcattaaatcagctgtgaatcgtcagggggtgtctgctagcctc

SEQ ID NO: 1883 - DNA, 50 bp, Homo Sapien
tgtcagcccagtaagtattggccagtcaggcgcctcgtggtcagagcaga

SEQ ID NO: 1884 - DNA, 50 bp, Homo Sapien
ctggccctacaggtttctgcggcgctttgggcgggacaaggtaacctttt

SEQ ID NO: 1885 - DNA, 50 bp, Homo Sapien
cgcaaactcagctttaccgagtctctgaccagtggtgcctcactgctaac

SEQ ID NO: 1886 - DNA, 50 bp, Homo Sapien
agacagacgagacacgacagaccggaacgcacgaccaccgaacaagcaac

SEQ ID NO: 1887 - DNA, 50 bp, Homo Sapien
ttgctgcgtgttgatttggaggcactgcagtccaggccgagtcctcagtg

SEQ ID NO: 1888 - DNA, 50 bp, Homo Sapien
agacggggttagcggagcaatgcgcaggaataaggaagcgacctgcaacc

SEQ ID NO: 1889 - DNA, 50 bp, Homo Sapien
cagaagtgacatcctattgctttcaccatgttttatctgttagaagcaaa

SEQ ID NO: 1890 - DNA, 50 bp, Homo Sapien
acctctttttgaacagggaattgattcaagattggacatggtctcctctg

SEQ ID NO: 1891 - DNA, 50 bp, Homo Sapien
atgatgtgaccctcaatcccacatacgcagggggaaggcttggagtagac

SEQ ID NO: 1892 - DNA, 50 bp, Homo Sapien
gtaatgggtaaggttctaataggccatgtttatgactgttgcatagaatt

SEQ ID NO: 1893 - DNA, 50 bp, Homo Sapien
cagcttgtttaacggcagtgtcattcccctttgcactgtaatgaggaaaa

SEQ ID NO: 1894 - DNA, 50 bp, Homo Sapien
cttgcctgtacttgtcagaactagaggaaatagccaagactaatgaaaaa

SEQ ID NO: 1895 - DNA, 50 bp, Homo Sapien
gacattccacggggtcctactggatgcgttcttcaacgagagcagtgctg

SEQ ID NO: 1896 - DNA, 50 bp, Homo Sapien
cagaggagtaagatggtgatgttcacctggcaatcagctgagttgagact

SEQ ID NO: 1897 - DNA, 50 bp, Homo Sapien
aaacctcaagtgctcgcagaagcatcggcaagtcaggcgtcctgtttctc

SEQ ID NO: 1898 - DNA, 50 bp, Homo Sapien
gggcattttagcattgattattggactttccgttgggctgaattaagagt

SEQ ID NO: 1899 - DNA, 50 bp, Homo Sapien
ggcgggtagagcaccatgatcacgctgttgtgagtggaagattggctgga

SEQ ID NO: 1900 - DNA, 50 bp, Homo Sapien
caaaaccctcaagaactgacagcattacactgaacaccgacaccaagagc

SEQ ID NO: 1901 - DNA, 50 bp, Homo Sapien
caatggtttattcccaagtatgccttaagcagaacaaatgtgtttttcta

SEQ ID NO: 1902 - DNA, 50 bp, Homo Sapien
ttgcttccctttccccacaagaacaaagcactggccgggtaaggtggctc

SEQ ID NO: 1903 - DNA, 50 bp, Homo Sapien
tattcaccctgggcgcgcgtccactccccggatgttttctgtgcaatcga

SEQ ID NO: 1904 - DNA, 50 bp, Homo Sapien
aatcctcaagttcgttgctcggaactacctagagggataactgttccccc

SEQ ID NO: 1905 - DNA, 50 bp, Homo Sapien
tgccggaactgatcagaaccatcatgggctggacattggacttcctccgg

SEQ ID NO: 1906 - DNA, 50 bp, Homo Sapien
ggtagtacttcttgtccgcgattctcacgcttaagacctggttttctctt

SEQ ID NO: 1907 - DNA, 50 bp, Homo Sapien
ttccagaatggcagtgtattagtaggagagctctacagctatggaacatt

SEQ ID NO: 1908 - DNA, 50 bp, Homo Sapien
gacgggtggacttcccgctggatcgaatccaaacacaagtcagattttgg

SEQ ID NO: 1909 - DNA, 50 bp, Homo Sapien
cagtcatggatgaccagcgcgaccttatctccaacaatgagcaactgccc

SEQ ID NO: 1910 - DNA, 50 bp, Homo Sapien
ttgttaggtgggtgtccacgagtgactagctgtctttccataggtctggt

SEQ ID NO: 1911 - DNA, 50 bp, Homo Sapien
caagcgctctaattcctataaatacgaaactcgagaagattcaatcactg

SEQ ID NO: 1912 - DNA, 50 bp, Homo Sapien
gcaagataccgagacatgtgactatggctggcacaaattccaagggcagt

SEQ ID NO: 1913 - DNA, 50 bp, Homo Sapien
tttcgggacgaggcagagaggatcatgagggactcccctgtcattgatgg

SEQ ID NO: 1914 - DNA, 50 bp, Homo Sapien
cttgtggtaaggttgggttcttgatgccggggggtgtcctttaaccccag

SEQ ID NO: 1915 - DNA, 50 bp, Homo Sapien
cctcgctccttctggtatatgcatgtcactgcatgataattgagttttcc

SEQ ID NO: 1916 - DNA, 50 bp, Homo Sapien
tgttaggagcctcaaaaccttcttgtatcccttttacagtcaaagtccaa

SEQ ID NO: 1917 - DNA, 50 bp, Homo Sapien
catttggggactgtgtacaatgagttatggagactcgagggttcatgcag

SEQ ID NO: 1918 - DNA, 50 bp, Homo Sapien
taaggggtgcactttatagctatggaaacatgagattctcctctattgga

SEQ ID NO: 1919 - DNA, 50 bp, Homo Sapien
aacaacgggaacgttactgactctggtgccttatctcgaagggaccagaa

SEQ ID NO: 1920 - DNA, 50 bp, Homo Sapien
gtagctttggaagtttagctctgagaaccgtagatgatttcagttctagg

SEQ ID NO: 1921 - DNA, 50 bp, Homo Sapien
gggtaagctaaatcatagtttctgacaataactgggaaggttttttctta

SEQ ID NO: 1922 - DNA, 50 bp, Homo Sapien
aagcaatccagccgagcttgaggaaagtgacgcccttggagtgaggcgag

SEQ ID NO: 1923 - DNA, 50 bp, Homo Sapien
agatgaacataatctaccaacgaaagacgtgattcaattcaacactccct

SEQ ID NO: 1924 - DNA, 50 bp, Homo Sapien
aactaccagcgtatccgaatccaggagagtccaggcaaagtggcggctgg

SEQ ID NO: 1925 - DNA, 50 bp, Homo Sapien
cccctgttcactctacttagcatgtccctaccgagtctcttctccactgg

SEQ ID NO: 1926 - DNA, 50 bp, Homo Sapien
atgtaagatgttctttcctatatatggtttccaaagggtgcccctatgat

SEQ ID NO: 1927 - DNA, 50 bp, Homo Sapien
gggcatactctgcgttaaggtggacgttttgaccgagtcgatgcgccgtt

SEQ ID NO: 1928 - DNA, 50 bp, Homo Sapien
tgatttaatgtagtactctgcttctgtatccccgaggtgagtcagaaaaa

SEQ ID NO: 1929 - DNA, 50 bp, Homo Sapien
ccagaagatcccctcaggactgcaacaggcttgtgcaacaataaatgttg

SEQ ID NO: 1930 - DNA, 50 bp, Homo Sapien
atttctaagtgtgagggggaccactcacttactcgtacacgatgtggccc

SEQ ID NO: 1931 - DNA, 50 bp, Homo Sapien
cccaccaaacctaacaaggacccccgaacactttcatactaagactgtaa

SEQ ID NO: 1932 - DNA, 50 bp, Homo Sapien
tccaggactcatattggcgactggtaatcgggatataactaaaagataga

SEQ ID NO: 1933 - DNA, 50 bp, Homo Sapien
ttggaatatatggtccaatgaagcacatccctcgcgcccgacccgccctg

SEQ ID NO: 1934 - DNA, 50 bp, Homo Sapien
ttttgcaagaaggagaggaatgggggagaggacgtgagggaccaccccca

SEQ ID NO: 1935 - DNA, 50 bp, Homo Sapien
aacaattgatcccagaagggcaaattgtttgagtcagtaatgagctgaga

SEQ ID NO: 1936 - DNA, 50 bp, Homo Sapien
tatttttgatccggattacatcaaggagttggtgaatgatatcaggaagt

SEQ ID NO: 1937 - DNA, 50 bp, Homo Sapien
acctccttctgtcatcaactcagatgggtttccaagcgttcattcaaaaa

SEQ ID NO: 1938 - DNA, 50 bp, Homo Sapien
tggtgaaaatcgccttcaatacccctaccgccgtgcaaaaggaggaggcg

SEQ ID NO: 1939 - DNA, 50 bp, Homo Sapien
aatgaagacatagccgattctctgcccgggccccttgctgatgctcctcc

SEQ ID NO: 1940 - DNA, 50 bp, Homo Sapien
gctggaacctagatcgccgatgtagatttgtacaggagtctccgttggcc

SEQ ID NO: 1941 - DNA, 50 bp, Homo Sapien
agcagcatcatgtgcttcgggtgtcacgacgtctactcacaggccagcct

SEQ ID NO: 1942 - DNA, 50 bp, Homo Sapien
gattgccaccaatatcgcagagacatcgctgactattgatggtatctact

SEQ ID NO: 1943 - DNA, 50 bp, Homo Sapien
caataatgtaaatcaacgcccctcctttagggatctagctcttcgagtgg

SEQ ID NO: 1944 - DNA, 50 bp, Homo Sapien
ttctgccaggaccgcttctactggcgcgtgagttcccggagtgagttgaa

SEQ ID NO: 1945 - DNA, 50 bp, Homo Sapien
aataccgcgccctctctgagcaaggcgtctgcaccctagagatccggaaa

SEQ ID NO: 1946 - DNA, 50 bp, Homo Sapien
gagtgtttagaaagtgtaagggctctgcaactaaaaggacctgacctaga

SEQ ID NO: 1947 - DNA, 50 bp, Homo Sapien
cagctgattagtgtctaaggaatgatccaatactgttgcccttttccttg

SEQ ID NO: 1948 - DNA, 50 bp, Homo Sapien
caacacatcatgttacagaactcttcaggaatagagaaatacaattagga

SEQ ID NO: 1949 - DNA, 50 bp, Homo Sapien
atccttcggcacgctcgcgagtcagaatgcccccactttcggatcactgt

SEQ ID NO: 1950 - DNA, 50 bp, Homo Sapien
tccaaaaagagcttcctttcgtgacgagacgcggacgcaggtccaccctc

SEQ ID NO: 1951 - DNA, 50 bp, Homo Sapien
atccacctccatccgcttggaaatggccttcgtcccggcctatgactggt

SEQ ID NO: 1952 - DNA, 50 bp, Homo Sapien
gttccttcgttcagctgagattttcaataagaaacttccgtctgggcatt

SEQ ID NO: 1953 - DNA, 50 bp, Homo Sapien
ttcatccctctcatatcaacccgagtgtctcttcggaaaacccgccagcc

SEQ ID NO: 1954 - DNA, 50 bp, Homo Sapien
gaccgtgaggatgaaattaatagtggggcctttgtgagctagaggctggg

SEQ ID NO: 1955 - DNA, 50 bp, Homo Sapien
tgaacctgcctacacccctataccccatgatgtgccccatggaacacccc

SEQ ID NO: 1956 - DNA, 50 bp, Homo Sapien
gcctgaagctgagcgtgtacgttaatgtgaatgtatatagtctttgcaga

SEQ ID NO: 1957 - DNA, 50 bp, Homo Sapien
taccgaaaaaccttaatacactgctatggaggacttgcgagatcttgtct

SEQ ID NO: 1958 - DNA, 50 bp, Homo Sapien
acacttttgctatataacctaagtgataaccctcttttagttacctgcca

SEQ ID NO: 1959 - DNA, 50 bp, Homo Sapien
aattttccgggaactttgcagcataccaattacccataaacagcacacct

SEQ ID NO: 1960 - DNA, 50 bp, Homo Sapien
aaggaactgaggcctgggtgatttatttattgggaaagtgagggagggag

SEQ ID NO: 1961 - DNA, 50 bp, Homo Sapien
ctgtcagcatggaaagtcgggggctttcgcccgggtcctcctagaaattc

SEQ ID NO: 1962 - DNA, 50 bp, Homo Sapien
ttacatttaatagacttacagggataaggcctgtggggggtaatccctgc

SEQ ID NO: 1963 - DNA, 50 bp, Homo Sapien
ggatacatcagattggatgccaagcgttcctctgccggacatacaagagt

SEQ ID NO: 1964 - DNA, 50 bp, Homo Sapien
tcattagacgctgctgctggtatgttgtatctcgagagtaaaaactgtat

SEQ ID NO: 1965 - DNA, 50 bp, Homo Sapien
tcccctacccaggcatgaataaacgggaagtgttggaacaggtggagcag

SEQ ID NO: 1966 - DNA, 50 bp, Homo Sapien
attgttgaggtggtctgaatgttctgacattaacagttttccatgaaaac

SEQ ID NO: 1967 - DNA, 50 bp, Homo Sapien
agactattccctccgtttagagaatgtaccggcgcctagccgagcagaca

SEQ ID NO: 1968 - DNA, 50 bp, Homo Sapien
tccaagtgctggacacccgcatgtgtaacaacagccgcttctggaacggc

SEQ ID NO: 1969 - DNA, 50 bp, Homo Sapien
ctacaaggtgggtgagaacgctgactcgcagatcaagttgtccatcaagc

SEQ ID NO: 1970 - DNA, 50 bp, Homo Sapien
taacccctgtgactcaatattaccatagtgcgatgtcgttttgtgctatt

SEQ ID NO: 1971 - DNA, 50 bp, Homo Sapien
cttttgtgaggattcgttaggaagaaaagcgctaagttagtgaatgaaac

SEQ ID NO: 1972 - DNA, 50 bp, Homo Sapien
gtgtctgctggaagtctactgccattatagggaaccttgcttgttagctt

SEQ ID NO: 1973 - DNA, 50 bp, Homo Sapien
gttcaaagattagagcgagtacttaatggtaaaataccgtcttatatgca

SEQ ID NO: 1974 - DNA, 50 bp, Homo Sapien
catatgcaccttgtgtctgtacacgtgtcctgtagttgcgtggactctgc

SEQ ID NO: 1975 - DNA, 50 bp, Homo Sapien
ttggtcacaaattgactgttacaacaccatttcatagagaccagactgtg

SEQ ID NO: 1976 - DNA, 50 bp, Homo Sapien
gtgtacttaatcaccttagtgccagtttaatccagttatgcagaagaaat

SEQ ID NO: 1977 - DNA, 50 bp, Homo Sapien
atgaagtgtacgagctgatgcgtcagtgctggcgggaccgtccctatgag

SEQ ID NO: 1978 - DNA, 50 bp, Homo Sapien
cagtcaagccgggggaataatgaggtggtgggcggaacggattccagcat

SEQ ID NO: 1979 - DNA, 50 bp, Homo Sapien
tctcaatttaccacccaaacgcgccaccgacccgatcccatcgtgaccga

SEQ ID NO: 1980 - DNA, 50 bp, Homo Sapien
gccagtttcattctgacgagctctatagtagtccggtgtggacctctgcc

SEQ ID NO: 1981 - DNA, 50 bp, Homo Sapien
taacaaggaataatcccacaatatacctagctacctaatacatggagctg

SEQ ID NO: 1982 - DNA, 50 bp, Homo Sapien
aagggcccccacatttgtgccgacactgttctccttcggtggaagagctc

SEQ ID NO: 1983 - DNA, 50 bp, Homo Sapien
aggagtctctgccacccactcaggattgggaattgtctttagtgccggct

SEQ ID NO: 1984 - DNA, 50 bp, Homo Sapien
ttcgctctctccgctcctatacctctatctgtcgtgcttaaacctctgct

SEQ ID NO: 1985 - DNA, 50 bp, Homo Sapien
tgtctgcagtggagagagggggagggcacacatgtggaagcttcggaaag

SEQ ID NO: 1986 - DNA, 50 bp, Homo Sapien
cgcccgaagagcctcagtgcttacactaaggagtcgtcttctatgcaata

SEQ ID NO: 1987 - DNA, 50 bp, Homo Sapien
cgtccctctttttgttggttaccccattatcgtttgccctagcccccgcc

SEQ ID NO: 1988 - DNA, 50 bp, Homo Sapien
agtgcgtgaggagtttaaggagctgaaagcgcgcaataccaagaaggagg

SEQ ID NO: 1989 - DNA, 50 bp, Homo Sapien
cttgaccctaggaagtgcccggcgtaccagtaccttcgccatccttttgt

SEQ ID NO: 1990 - DNA, 50 bp, Homo Sapien
caatgaaaccagatttctcacttgctcttcatacttctattttgaggtaa

SEQ ID NO: 1991 - DNA, 50 bp, Homo Sapien
aagaattccaagggagcggacagtggcacgctgtgattgacacccaggcg

SEQ ID NO: 1992 - DNA, 50 bp, Homo Sapien
aaaacccagccttgcccgtggggagtaagagttaataaacacactcacga

SEQ ID NO: 1993 - DNA, 50 bp, Homo Sapien
aatctttcaacatacctgattccccgacactggataccgaagatgaaccc

SEQ ID NO: 1994 - DNA, 50 bp, Homo Sapien
agcccacccagcagaaatacaatccgagctacaaagcatgggaaaaagag

SEQ ID NO: 1995 - DNA, 50 bp, Homo Sapien
caaagctcttggaggctttaaagttctttctgttgggtgtgcattacagt

SEQ ID NO: 1996 - DNA, 50 bp, Homo Sapien
tggaccctttttgtgaagattggtctctgtggtgtgattctcttcccagg

SEQ ID NO: 1997 - DNA, 50 bp, Homo Sapien
cagagccagcctagtcattatttgctgtcgggtttccagtttcaccgtgt

SEQ ID NO: 1998 - DNA, 50 bp, Homo Sapien
gtttcttggtaaatccagaatcaggatacaatgtctctttgctatatgac

SEQ ID NO: 1999 - DNA, 50 bp, Homo Sapien
agctaagctggaagggtgcttatccctgcgtagaaacgcctgccaatgct

SEQ ID NO: 2000 - DNA, 50 bp, Homo Sapien
ttccggaattcagtactgtggcattaaacgtcgtctttgaaaaaatcccg

SEQ ID NO: 2001 - DNA, 50 bp, Homo Sapien
acccgccgtttttgttcagtctacccactctcagggtaacaatgcctcag

SEQ ID NO: 2002 - DNA, 50 bp, Homo Sapien
ctacctcagaatgacgaccattacgtcatgcaggaacatcgcaaggtgcc

SEQ ID NO: 2003 - DNA, 50 bp, Homo Sapien
ctgccagactagcaatttgggggcttactcatgctaggcttgaggaagaa

SEQ ID NO: 2004 - DNA, 50 bp, Homo Sapien
tgggaatcgaacctagggatagtgctccacttctgacgatggagtgaaga

SEQ ID NO: 2005 - DNA, 50 bp, Homo Sapien
aacttaccgatcatcgcacgccggagttcgatcacgagaccgacggggaa

SEQ ID NO: 2006 - DNA, 50 bp, Homo Sapien
tgaaactgtgtgacagctatgaaattcgccctggtaaacaccttggagtg

SEQ ID NO: 2007 - DNA, 50 bp, Homo Sapien
ttgtccaggaatcttctcagattgatcactgtgcgaaagctcttttcatc

SEQ ID NO: 2008 - DNA, 50 bp, Homo Sapien
cacttccaatggacagccctcgaccttaactattttcgagacagcactgt

SEQ ID NO: 2009 - DNA, 50 bp, Homo Sapien
tgtacttaagcatcactcaagggtaagtgttctaggaaggttgatttagc

SEQ ID NO: 2010 - DNA, 50 bp, Homo Sapien
gtgtgtcacaacaggctagggcacttcacgatgtcactacttgtttttct

SEQ ID NO: 2011 - DNA, 50 bp, Homo Sapien
ctgctattctgaaattgcctacatgtttcaataccagttatatggagtgc

SEQ ID NO: 2012 - DNA, 50 bp, Homo Sapien
agacacatcggaagaggcgtgcggctctactacatcggaggggaggtctt

SEQ ID NO: 2013 - DNA, 50 bp, Homo Sapien
tcatttgatccgcaagtctagcagcggactaacttatatcgcagagtgga

SEQ ID NO: 2014 - DNA, 50 bp, Homo Sapien
agggagtgttccctatccaatcaatcttgcatgtaacgcaagttcccagt

SEQ ID NO: 2015 - DNA, 50 bp, Homo Sapien
gatgtttgccttagacagtatcattcggaaggcggtacagacagccatta

SEQ ID NO: 2016 - DNA, 50 bp, Homo Sapien
attgtcatctttgccatgcgtaagatctaccgaggagaggaactcactta

SEQ ID NO: 2017 - DNA, 50 bp, Homo Sapien
cttgagcggcatcgaatagaggcagctatggaccgaaagtctgatagtga

SEQ ID NO: 2018 - DNA, 50 bp, Homo Sapien
ggactgtgaccgactttaagcaaaccgtcaacaaaggctattggttttca

SEQ ID NO: 2019 - DNA, 50 bp, Homo Sapien
tttttcaccggggcgtggctaccctgtcgtgacgcgtttccgcgtattgt

SEQ ID NO: 2020 - DNA, 50 bp, Homo Sapien
aaaggtgtccctacaggcttcattctgcccattcgcgacatccgcgccag

SEQ ID NO: 2021 - DNA, 50 bp, Homo Sapien
ttggagcccgtgcagtacaggcaaaacacgcaagggcatcaggcactggt

SEQ ID NO: 2022 - DNA, 50 bp, Homo Sapien
cttatttgtgctgttatagaatatcagctctgaacgtgtggtaaagattt

SEQ ID NO: 2023 - DNA, 50 bp, Homo Sapien
ttcagccactcaggaccctggctttctgctccaaggcactgaacacagtc

SEQ ID NO: 2024 - DNA, 50 bp, Homo Sapien
gagattttcatctattatactttatcaaagattggccatgttccacttgg

SEQ ID NO: 2025 - DNA, 50 bp, Homo Sapien
cgtaacttaccctatggacaaaagcaggaatgactaacacatcctaggag

SEQ ID NO: 2026 - DNA, 50 bp, Homo Sapien
tgtcgcttcctagaatccccttctccaaacgattagtctaaattttcaga

SEQ ID NO: 2027 - DNA, 50 bp, Homo Sapien
cccagcagagtgagctgttgactcgatcgaaaccccggcgaaagaaatca

SEQ ID NO: 2028 - DNA, 50 bp, Homo Sapien
ctgtcaatgtaccgctctacaccagtgtattacgacagttcgtacacaac

SEQ ID NO: 2029 - DNA, 50 bp, Homo Sapien
ataattctcagtagttgtccgtgataatcgtgtcctgaaaatcctcgcac

SEQ ID NO: 2030 - DNA, 50 bp, Homo Sapien
tgttgaaatgagagcggtttcttacagtctacccggcgttgtggcacatg

SEQ ID NO: 2031 - DNA, 50 bp, Homo Sapien
actacaccataaaatgctatgagagttttatgagtggtgccgacagcttt

SEQ ID NO: 2032 - DNA, 50 bp, Homo Sapien
cctgttagagaccctcatgggctaggacttttcatctaggatagattcaa

SEQ ID NO: 2033 - DNA, 50 bp, Homo Sapien
gcagaccctaatctctcctcaccgacagatggcacttcacagaacagaaa

SEQ ID NO: 2034 - DNA, 50 bp, Homo Sapien
gtgacgacaagaagcgcatcattgactcagcccggtcagcctaccaggag

SEQ ID NO: 2035 - DNA, 50 bp, Homo Sapien
gcaagaggactcatggacgtctctagaacatatcttgtggccatttacca

SEQ ID NO: 2036 - DNA, 50 bp, Homo Sapien
ttgtggaaccagtgatgcctcaaagacagtgtcccctccacagctgggtg

SEQ ID NO: 2037 - DNA, 50 bp, Homo Sapien
aagagccagacagcgccaactcatcgttctacagcacgcggtctgctcct

SEQ ID NO: 2038 - DNA, 50 bp, Homo Sapien
atggcgctggtacgtaaatagaccaatgcagttaggtggctctttccaag

SEQ ID NO: 2039 - DNA, 50 bp, Homo Sapien
ttgatcagcctggctggtaccgtctagtactatgcagcggtcctcaagtt

SEQ ID NO: 2040 - DNA, 50 bp, Homo Sapien
cagagttgctgagttcagtattgctaatgcagtatttttcattgtgcctt

SEQ ID NO: 2041 - DNA, 50 bp, Homo Sapien
tctcccagtctccgcaagggagagtcatgaccattccgtaccagcccatg

SEQ ID NO: 2042 - DNA, 50 bp, Homo Sapien
ggcttgtgttgtaatagtgtgggccgctttgtctcaaatccgcagttcta

SEQ ID NO: 2043 - DNA, 50 bp, Homo Sapien
taacttgctggccttatgcttacatggtctcatgtaatgtgcacaacaca

SEQ ID NO: 2044 - DNA, 50 bp, Homo Sapien
acattttcagcgttggctgagttacatgtacagtgcttaggccacctggg

SEQ ID NO: 2045 - DNA, 50 bp, Homo Sapien
agacaaccaggtgatgcacttctaccgctggcttcggtcgccatcctctc

SEQ ID NO: 2046 - DNA, 50 bp, Homo Sapien
agcctaaaggtgatgggtcctcgcctaggcttagtgctaccatgtgggtt

SEQ ID NO: 2047 - DNA, 50 bp, Homo Sapien
cccaaagggaatagagattctccaggaatttcctctatgggaccttccca

SEQ ID NO: 2048 - DNA, 50 bp, Homo Sapien
ggctgcgataagtgaagagttgaaccacacaacccgcgttgtgaataatt

SEQ ID NO: 2049 - DNA, 50 bp, Homo Sapien
aaaggagcaacacactgcccctaggcgtgcgtgtggcccagtttctctct

SEQ ID NO: 2050 - DNA, 50 bp, Homo Sapien
tttgggttttcttgtccaggtgcttcataaagtcctggacccacttctgt

SEQ ID NO: 2051 - DNA, 50 bp, Homo Sapien
gagattgctacacggagcagtccttgacgatcgtgtttctgacgtttctc

SEQ ID NO: 2052 - DNA, 50 bp, Homo Sapien
tttcagtttcatattacccctatatgcatcaaagctgcaacttcccttgc

SEQ ID NO: 2053 - DNA, 50 bp, Homo Sapien
actgctgactggtgagatcccctacaaagacgtagattcctcagccatta

SEQ ID NO: 2054 - DNA, 50 bp, Homo Sapien
tgcctgtagcccatatgctagaggttggtgaccctgacgacttggctttc

SEQ ID NO: 2055 - DNA, 50 bp, Homo Sapien
gcattcttcttacttccccgtacgctttctgtgctattccgcctccccct

SEQ ID NO: 2056 - DNA, 50 bp, Homo Sapien
tcctcatcttttcgcaccaccaagcctactaatgcccacgggctctcagg

SEQ ID NO: 2057 - DNA, 50 bp, Homo Sapien
tgacgttcggaaccaagcagacgttatttacgtcaatacacagttgctgg

SEQ ID NO: 2058 - DNA, 50 bp, Homo Sapien
gctgaaggcacttagtgcccacaaccgcaccaagaagcacgacctgctga

SEQ ID NO: 2059 - DNA, 50 bp, Homo Sapien
ctatgaggccggagttgtatccttttataacgggaatactggctgccaca

SEQ ID NO: 2060 - DNA, 50 bp, Homo Sapien
gaagcagtcccccctgtaaatagtccttggatattaccgtctggttgtcg

SEQ ID NO: 2061 - DNA, 50 bp, Homo Sapien
ccccatgtcagtgccgtcatctagactgattatgcccgcagtgatcctgt

SEQ ID NO: 2062 - DNA, 50 bp, Homo Sapien
cctattgcactgtgttctcctactgcaaatattttcatatgggaggatgg

SEQ ID NO: 2063 - DNA, 50 bp, Homo Sapien
gataatacaatcatttccaccgcttgactcacttaacttgcccctgccac

SEQ ID NO: 2064 - DNA, 50 bp, Homo Sapien
tctgacccccatggcatcgagagcaaacggcggaagaaaaagccggccat

SEQ ID NO: 2065 - DNA, 50 bp, Homo Sapien
taaaggcctctggatactgggctccccagaactgctggccacaggatggt

SEQ ID NO: 2066 - DNA, 50 bp, Homo Sapien
ctccaaggaatgcacccacgagccaacatcatgagaccccggacaaacac

SEQ ID NO: 2067 - DNA, 50 bp, Homo Sapien
tgatacatacgcagaacaaagttacgaaggctacgaaggctattacagcc

SEQ ID NO: 2068 - DNA, 50 bp, Homo Sapien
tttaagagagccatcagttagctatcagactctaggttgatgcattttgt

SEQ ID NO: 2069 - DNA, 50 bp, Homo Sapien
ctaagtgaccgccccacctgtggcttatacgtggcgtggcctctttcttc

SEQ ID NO: 2070 - DNA, 50 bp, Homo Sapien
cccaatatgctgcctcaactctgagctgtctgcaaggcttagtaagtatt

SEQ ID NO: 2071 - DNA, 50 bp, Homo Sapien
caagccatcgtggttggctggaactagacgtgtgatttgaatgcaggagt

SEQ ID NO: 2072 - DNA, 50 bp, Homo Sapien
ttctttgccgctgatgagttaaagggtgacaacatgtacagctgtgagcg

SEQ ID NO: 2073 - DNA, 50 bp, Homo Sapien
tgctggccaagcatgtcatcactctgcacgtgagcgcactgacacagaca

SEQ ID NO: 2074 - DNA, 50 bp, Homo Sapien
cctctcagagaaggtctctcacttggagtccatgctcaggaagctgcagg

SEQ ID NO: 2075 - DNA, 50 bp, Homo Sapien
tggaactactttaactaatccatagggacttctggtatgctttcctctct

SEQ ID NO: 2076 - DNA, 50 bp, Homo Sapien
aaataaaacacgtgcagatgtaaagggcgggacactcactcaatatgaag

SEQ ID NO: 2077 - DNA, 50 bp, Homo Sapien
tgtcgctggccatccattcagtcgattcagtcataggcgaatctgttctg

SEQ ID NO: 2078 - DNA, 50 bp, Homo Sapien
ctgctaaaaggtcagagtaatgcagaatgcgtgccttcatctcagatttg

SEQ ID NO: 2079 - DNA, 50 bp, Homo Sapien
tcaaagaccatgatggtatcggactagttttcagacactgcctgttgctg

SEQ ID NO: 2080 - DNA, 50 bp, Homo Sapien
ctagtgttcatggaggtagcattgaagatatggttgaaagatgcagccgt

SEQ ID NO: 2081 - DNA, 50 bp, Homo Sapien
gtcggcaaggagcgtgcatactgcgtttgtgtaattgtttgctgtatctc

SEQ ID NO: 2082 - DNA, 50 bp, Homo Sapien
ctccaaaagaaagtcttcgaagccgctccactcgcatgtccactgtctca

SEQ ID NO: 2083 - DNA, 50 bp, Homo Sapien
ttggtaaacattggcttgcctcccatgacttgccattataattaaaactg

SEQ ID NO: 2084 - DNA, 50 bp, Homo Sapien
ctaccaccacacaaacttagttcatatgctcttacttgggcaagggtgct

SEQ ID NO: 2085 - DNA, 50 bp, Homo Sapien
ggatcgactttgggcatgcgtttggatccgctacacagtttctgccagtc

SEQ ID NO: 2086 - DNA, 50 bp, Homo Sapien
aggctagaacgtcagataaacatgattccactcgtgcttcctcaaataaa

SEQ ID NO: 2087 - DNA, 50 bp, Homo Sapien
aacttcatgtcaactttctggctcctcaaacagtaggttggcagtaaggc

SEQ ID NO: 2088 - DNA, 50 bp, Homo Sapien
agagcgactgcacataggggaaaacacacttggggtcaggctttttgccc

SEQ ID NO: 2089 - DNA, 50 bp, Homo Sapien
ttttttgtacgtagctgttacatgtagggcaatctgtctttaagtaggga

SEQ ID NO: 2090 - DNA, 50 bp, Homo Sapien
aactgtaaccattgaattgaagaacggaacacaggtccatggaacaatca

SEQ ID NO: 2091 - DNA, 50 bp, Homo Sapien
tggggcatgactattcgatttgactcaagcttcagtagactcagaagaag

SEQ ID NO: 2092 - DNA, 50 bp, Homo Sapien
ggattagtgggctgcgtttcaacattccgtgttcgtactcccttttgtat

SEQ ID NO: 2093 - DNA, 50 bp, Homo Sapien
acatggctcgtggagagaagtctttggcctatcatgaatggaaaatggcc

SEQ ID NO: 2094 - DNA, 50 bp, Homo Sapien
ttcaggctacaaccactagcacggctgacgatggccctttctgcggagac

SEQ ID NO: 2095 - DNA, 50 bp, Homo Sapien
ttcaaccaccgagtgatcggggcacaagttgaccagtctgtcttcgagga

SEQ ID NO: 2096 - DNA, 50 bp, Homo Sapien
ttctatttggcaaacagcaatgatcttccaataaaagatttcagatgctc

SEQ ID NO: 2097 - DNA, 50 bp, Homo Sapien
ttattagaccccggggcagtcaggtgctccggacacccgaaggcaataaa

SEQ ID NO: 2098 - DNA, 50 bp, Homo Sapien
ggtgtcccaacgtataaactatcacagtagcgctcatggctcgtaggttt

SEQ ID NO: 2099 - DNA, 50 bp, Homo Sapien
ttgtaatttgaatctagtatggtgttctgttttcagctgacttggacaac

SEQ ID NO: 2100 - DNA, 50 bp, Homo Sapien
caggttttacgatgtataatttacctaatagaccaaactaactcatggag

SEQ ID NO: 2101 - DNA, 50 bp, Homo Sapien
caacatacaagtcttgacaacagcatctggtctactagactttcttacag

SEQ ID NO: 2102 - DNA, 50 bp, Homo Sapien
cgaccattgctgcatattggcatgggacccaggtacgtagagaatacagg

SEQ ID NO: 2103 - DNA, 50 bp, Homo Sapien
acacagttgccctaatgcggctggaatccccattgggggtaggtgagcag

SEQ ID NO: 2104 - DNA, 50 bp, Homo Sapien
gtcttacatgctcgtgaacgagaaccgattctgcaacgacgccatgaagg

SEQ ID NO: 2105 - DNA, 50 bp, Homo Sapien
cctccccactgtttatttattgcacggatctaagttattctccccagcca

SEQ ID NO: 2106 - DNA, 50 bp, Homo Sapien
tacagatataataaccatgttgactatgggggagagacgctgcattccag

SEQ ID NO: 2107 - DNA, 50 bp, Homo Sapien
ccaaaataatggtgagtgcctaggcttcccgagttagctctttgggtggc

SEQ ID NO: 2108 - DNA, 50 bp, Homo Sapien
atatccaggagattcattaggtcatcagcgatcaaaggttagcattttat

SEQ ID NO: 2109 - DNA, 50 bp, Homo Sapien
gggctgtacaaggtcaatgagtacgtcgatgctcgggacacgaacatggg

SEQ ID NO: 2110 - DNA, 50 bp, Homo Sapien
taagaagctcatgtggacttgttctattgcctgacctgatgaactgttaa

SEQ ID NO: 2111 - DNA, 50 bp, Homo Sapien
atcctccttttgtcttcacctcgatgacgaaaacctaaggaggacagagg

SEQ ID NO: 2112 - DNA, 50 bp, Homo Sapien
cgccctaagtcctccagtctccttagagctagtacttactaagcatttac

SEQ ID NO: 2113 - DNA, 50 bp, Homo Sapien
catctatagtttggccaccatacagtggcctcaaagcaaccatggcctac

SEQ ID NO: 2114 - DNA, 50 bp, Homo Sapien
gaagttcagtatgttatgatggaccaataattctgcccttcgggtttctc

SEQ ID NO: 2115 - DNA, 50 bp, Homo Sapien
accctctccgcccttggggtaatgtactttgtgatattgccacccgcccc

SEQ ID NO: 2116 - DNA, 50 bp, Homo Sapien
ccacatggggttctgcggtgataatgagcacatagtgaggggtcagcaaa

SEQ ID NO: 2117 - DNA, 50 bp, Homo Sapien
attgaactcattccctgttccacaaacccatatgtatcctttcctcaacc

SEQ ID NO: 2118 - DNA, 50 bp, Homo Sapien
tccctccgcggattctccggggctggttcatcacctccgaatattcctgt

SEQ ID NO: 2119 - DNA, 50 bp, Homo Sapien
atgtgacctgctttcgatcataagactgtgttaagaccttctcctcagtg

SEQ ID NO: 2120 - DNA, 50 bp, Homo Sapien
tttacggcagacgtacccccgttcaccccacgttactagtaggggaccga

SEQ ID NO: 2121 - DNA, 50 bp, Homo Sapien
acccagcgatgtgttgcagaaattatagctggtttaatcagaggttctaa

SEQ ID NO: 2122 - DNA, 50 bp, Homo Sapien
caccactacgcgcacgcagcgatataggcatcgcacctctatcatcgtca

SEQ ID NO: 2123 - DNA, 50 bp, Homo Sapien
agtcctagatatacttactgctggtacagttgtactctaagattggtatt

SEQ ID NO: 2124 - DNA, 50 bp, Homo Sapien
ttcctactgagtaaatcagcaacgaaagacactccaactaatggaaaaaa

SEQ ID NO: 2125 - DNA, 50 bp, Homo Sapien
ctacctttatattctccaacacaagaccgtgtaggtgtcccttcagagag

SEQ ID NO: 2126 - DNA, 50 bp, Homo Sapien
aagtctttccatcatagcaggcgtgaccagggggtatctggggaccaggt

SEQ ID NO: 2127 - DNA, 50 bp, Homo Sapien
gaacaaaatcgtatccgagatacccactagagagcaagaataaccgtttg

SEQ ID NO: 2128 - DNA, 50 bp, Homo Sapien
gggtgaagacggccagaacttggagaagagacggaatcttctgaactgcc

SEQ ID NO: 2129 - DNA, 50 bp, Homo Sapien
aggagaaaacacggtaacgtaattagaatagtcagagaaaagtagccaga

SEQ ID NO: 2130 - DNA, 50 bp, Homo Sapien
gtatccttagaatccaaatgtctagataagttgaggacacatacctgcat

SEQ ID NO: 2131 - DNA, 50 bp, Homo Sapien
actgcaggataaccgaactcaaggcttaattaacggggcactaaacaaaa

SEQ ID NO: 2132 - DNA, 50 bp, Homo Sapien
atattcactcccggaaatgtcgttgcttagtaatgtaacctggagctttt

SEQ ID NO: 2133 - DNA, 50 bp, Homo Sapien
agctcggctcaaagtgcgaagttgtttagatttccacgttacacaaacac

SEQ ID NO: 2134 - DNA, 50 bp, Homo Sapien
gggtatatcagtgtgtcttgcagaatcttggatcattaaagataaacata

SEQ ID NO: 2135 - DNA, 50 bp, Homo Sapien
acacgatgagccagcacgcacagtgagggatcgctcaacaggacacctct

SEQ ID NO: 2136 - DNA, 50 bp, Homo Sapien
acatgatctcactagccaagcagatcatcgaagccacaccggagcggatt

SEQ ID NO: 2137 - DNA, 50 bp, Homo Sapien
ccagttttagaggatgtccttgggaggatcgcaaagcagtctggtgagct

SEQ ID NO: 2138 - DNA, 50 bp, Homo Sapien
cagtttctggcaaccccgtgtatttccgttttccccctaaagaacatatc

SEQ ID NO: 2139 - DNA, 50 bp, Homo Sapien
acttgaatctcaaagaagtgcggtctatcggttgtggagattgttctgtt

SEQ ID NO: 2140 - DNA, 50 bp, Homo Sapien
acctggggaacgtgttcccggctgagatggattacttgcgctgtgctgca

SEQ ID NO: 2141 - DNA, 50 bp, Homo Sapien
aatactacccggggttcaacccgtttcgcgcctatatgaacctggacata

SEQ ID NO: 2142 - DNA, 50 bp, Homo Sapien
aggaacttcggcgagaactggaccgcgctaataaaaactgccgaatcctg

SEQ ID NO: 2143 - DNA, 50 bp, Homo Sapien
agttcagctgttgacgccttgcagaggctttgtagagcatctgcagagac

SEQ ID NO: 2144 - DNA, 50 bp, Homo Sapien
gtgtactgccagtgcaggcgaccactgcctacacagatccacattaaatc

SEQ ID NO: 2145 - DNA, 50 bp, Homo Sapien
ccgactttgacactgttatctccgtaatagctttaccattaggctaggat

SEQ ID NO: 2146 - DNA, 50 bp, Homo Sapien
aagagtgctgtaaggtacaggtttccatattgtgaacctgtgtacgcaca

SEQ ID NO: 2147 - DNA, 50 bp, Homo Sapien
gacagtacttcagtccaaaatccaactcgcctccgagaagcatccaaaag

SEQ ID NO: 2148 - DNA, 50 bp, Homo Sapien
gttgtatccagcaccggaaacggctccagcggaatcgacttaccaaagag

SEQ ID NO: 2149 - DNA, 50 bp, Homo Sapien
atatcgtactgaggtaacttccacgtagccccttgccacgcggcaccggt

SEQ ID NO: 2150 - DNA, 50 bp, Homo Sapien
acaggtcaaccttgtggagccatcgcgagttagagggtgaaagatggcag

SEQ ID NO: 2151 - DNA, 50 bp, Homo Sapien
ctggctaactggcagaaccacgcatccctacggttgttgaatctagtcta

SEQ ID NO: 2152 - DNA, 50 bp, Homo Sapien
tcacctattttgactcgcagcgtaccctaaaccgccgctgccctaagcat

SEQ ID NO: 2153 - DNA, 50 bp, Homo Sapien
ttcacttaaccatacggtcagcctagttagagtatgtgattcagtggctt

SEQ ID NO: 2154 - DNA, 50 bp, Homo Sapien
cacagtctatggaacgctaatggagtcagcccctaaagctgtttgctttt

SEQ ID NO: 2155 - DNA, 50 bp, Homo Sapien
ggcccatgaaattgatgaactgagagttgcttccagtcctgagcgcacca

SEQ ID NO: 2156 - DNA, 50 bp, Homo Sapien
ttgcttaccaaactggacatcattgatgatctggattcaggcagggtctg

SEQ ID NO: 2157 - DNA, 50 bp, Homo Sapien
atcgcgctgttgccactgttacaggcagaaaccgaccggaggaccttgca

SEQ ID NO: 2158 - DNA, 50 bp, Homo Sapien
aattactggttggtttgtaaacaccatcctccattcgacccattgacttc

SEQ ID NO: 2159 - DNA, 50 bp, Homo Sapien
ttcattccctggtagacaaatccaacatcaaccgacagttggaggtatac

SEQ ID NO: 2160 - DNA, 50 bp, Homo Sapien
ttggattggtatctgtcattgtagggatagataataagctcttcttattc

SEQ ID NO: 2161 - DNA, 50 bp, Homo Sapien
tcaaagcactcgatttccaaaacctgagttagagattcaatttacacctt

SEQ ID NO: 2162 - DNA, 50 bp, Homo Sapien
ctgctgttaatgatccagcattggtcacaatgtaccaactgctttctgca

SEQ ID NO: 2163 - DNA, 50 bp, Homo Sapien
caacttgtacaaagttgtatgacagggcatattctttgcttccaagattt

SEQ ID NO: 2164 - DNA, 50 bp, Homo Sapien
gacaggaaagactagcccatatatcctgcgaagaacaaccatggcaactc

SEQ ID NO: 2165 - DNA, 50 bp, Homo Sapien
aataatttgctgtcgtttcagacttggatcctataaacctgtcaattctg

SEQ ID NO: 2166 - DNA, 50 bp, Homo Sapien
gcctggggtaattggaggatccaaaccaaaggtcgccacacccaaagtgg

SEQ ID NO: 2167 - DNA, 50 bp, Homo Sapien
ggaaggatcgatcttatttaactatgtgtggaacaacccagtaatatcag

SEQ ID NO: 2168 - DNA, 50 bp, Homo Sapien
gttgtaatctagactctgcccgtttccgttacctaattggagaaaagttg

SEQ ID NO: 2169 - DNA, 50 bp, Homo Sapien
tcactgtgggcgggtccaccagtttgaatggtcaatgcgagtggctgtcc

SEQ ID NO: 2170 - DNA, 50 bp, Homo Sapien
atggaactcttctttggggactattactttgcaaatggggtcagagcctc

SEQ ID NO: 2171 - DNA, 50 bp, Homo Sapien
cattgatcttacgcatttactgtttaccgaacaaatgtctgactgtgtac

SEQ ID NO: 2172 - DNA, 50 bp, Homo Sapien
cctaagagaggagtgcattgctttagtacccgggccagttgagactgaaa

SEQ ID NO: 2173 - DNA, 50 bp, Homo Sapien
tacagttatcctacaagcactggtgcgtggttggctagtacgaaaaagat

SEQ ID NO: 2174 - DNA, 50 bp, Homo Sapien
tcagccacttgcagaacaggatgggaccgagatttcagcgagccctcctg

SEQ ID NO: 2175 - DNA, 50 bp, Homo Sapien
aaattaatatgacagatggccctcgtaccttaaatcctgacagccctcgc

SEQ ID NO: 2176 - DNA, 50 bp, Homo Sapien
agagtacattgaagctcgggtgacaaaaggtgagacactcacctagaaca

SEQ ID NO: 2177 - DNA, 50 bp, Homo Sapien
agcattgttcaaatgagtacactgtcagtggggtttaagatcatttggtg

SEQ ID NO: 2178 - DNA, 50 bp, Homo Sapien
gtattgctgctgtgcgtggaaaaagacgatgtttatgttcttatagaata

SEQ ID NO: 2179 - DNA, 50 bp, Homo Sapien
cactgccatgtatgcaactgctgtgtggctcgatatgatcaacactgcct

SEQ ID NO: 2180 - DNA, 50 bp, Homo Sapien
tgccctatagaatggttccattatggctgcgttggattgacagaggcacc

SEQ ID NO: 2181 - DNA, 50 bp, Homo Sapien
tcatagttccgtgagcgagcaattcagggactcggcgagcatgcactccg

SEQ ID NO: 2182 - DNA, 50 bp, Homo Sapien
aaagatcgtaacgcgagagccatccgccctatgtgggagatcccacaccc

SEQ ID NO: 2183 - DNA, 50 bp, Homo Sapien
tgattaacatcgctatcactcttgaccttactcccggttggcctgggggc

SEQ ID NO: 2184 - DNA, 50 bp, Homo Sapien
atacggccataaaactccttattagagagtctacagataaatctacagag

SEQ ID NO: 2185 - DNA, 50 bp, Homo Sapien
aactggccttaggagatccaaatagggaaccaagattgcagagtgtccca

SEQ ID NO: 2186 - DNA, 50 bp, Homo Sapien
tctagtgccgaatgactatgtccagattggtgacgatgggtgttgctgtt

SEQ ID NO: 2187 - DNA, 50 bp, Homo Sapien
gcaggtcccacgctcaccgacgaaaatggagatgatttaggattgccacc

SEQ ID NO: 2188 - DNA, 50 bp, Homo Sapien
cgactcaacgttgctgccgaactggtccagggtacagttcctttagaggt

SEQ ID NO: 2189 - DNA, 50 bp, Homo Sapien
tcaccttcgaggcctacaggttcgggggacactaccttcgtgtcaaagcc

SEQ ID NO: 2190 - DNA, 50 bp, Homo Sapien
tctagaggggacatccacaagtctcggtgcagttatgatggtgtgggatg

SEQ ID NO: 2191 - DNA, 50 bp, Homo Sapien
ggtgacccacctcttaggactttggtcttatccacgtgtatgttgttttc

SEQ ID NO: 2192 - DNA, 50 bp, Homo Sapien
cctcacaaggtgatccttttaacaatcgagttcaggaccttatcagctac

SEQ ID NO: 2193 - DNA, 50 bp, Homo Sapien
acagggcctgatattagtgaaactacactgggatagcatcagccatttaa

SEQ ID NO: 2194 - DNA, 50 bp, Homo Sapien
tgcaggtttatcgggactattacctcacgggtgatcaaaacttcctgaag

SEQ ID NO: 2195 - DNA, 50 bp, Homo Sapien
cgaaagtgtcagagattcggctgccggaaatgcaagtgccgaaggttccc

SEQ ID NO: 2196 - DNA, 50 bp, Homo Sapien
tggacatgccaatacacattactgacaggtatgcccacctgacctgcacc

SEQ ID NO: 2197 - DNA, 50 bp, Homo Sapien
accagaacagagcacaacaaaggacgagcagcgccagccgagacgacgta

SEQ ID NO: 2198 - DNA, 50 bp, Homo Sapien
ggcgcctgtattatactttgtacttttgcccaaacgtgtaaataataaaa

SEQ ID NO: 2199 - DNA, 50 bp, Homo Sapien
gtgtaaccatgattctattatgtattggtacgtctgtagaccaagatata

SEQ ID NO: 2200 - DNA, 50 bp, Homo Sapien
gaatggcactctgtgctatgaggtgcattataggacgaaggatgtccact

SEQ ID NO: 2201 - DNA, 50 bp, Homo Sapien
tccacatcacgactggggtctcgaagaggacgggggtaggaaatcctcca

SEQ ID NO: 2202 - DNA, 50 bp, Homo Sapien
tacagataattacctactctggctagaagctaggggtcccagtgaagagc

SEQ ID NO: 2203 - DNA, 50 bp, Homo Sapien
actatactctcccttatcgcgcgtctatatggccccgatcacccttccgc

SEQ ID NO: 2204 - DNA, 50 bp, Homo Sapien
ccccaggagcttactacaagtgctagaaatctggacaccaggccaaggaa

SEQ ID NO: 2205 - DNA, 50 bp, Homo Sapien
cagtagagacaagcgggaaggataattagctgaaagctatgatgatataa

SEQ ID NO: 2206 - DNA, 50 bp, Homo Sapien
actgctaaaggacaagtttagtcatacactgcataaccatattttggtca

SEQ ID NO: 2207 - DNA, 50 bp, Homo Sapien
aacagaacgtacaattcatgcataaccgaatgcagtacagtatggagtat

SEQ ID NO: 2208 - DNA, 50 bp, Homo Sapien
tctctgtcgtagacacaccgataggaccaatggccaatagatattaaaag

SEQ ID NO: 2209 - DNA, 50 bp, Homo Sapien
agcaggtggtaataccatgggtgctgtgacactaacagtcattgagaggt

SEQ ID NO: 2210 - DNA, 50 bp, Homo Sapien
agaacaatgcccctgtgcagatattacaggagtatgtcaatctggtggaa

SEQ ID NO: 2211 - DNA, 50 bp, Homo Sapien
tgtggttttgccaatatcgggtccctaggaatcgtgatcggcggactcac

SEQ ID NO: 2212 - DNA, 50 bp, Homo Sapien
cccttgcttggcgtgggggatggcttaactgtacctgtttggatgcttct

SEQ ID NO: 2213 - DNA, 50 bp, Homo Sapien
tttgaggtcacgcggctagtaattggagcctggtttagaaccaagtcagt

SEQ ID NO: 2214 - DNA, 50 bp, Homo Sapien
cgttccaaagattgtgcttataaatggctgtatgatgaaaccctggaaga

SEQ ID NO: 2215 - DNA, 50 bp, Homo Sapien
agatgtccacacgaggggtcggagttacctgatcacatcgagagagtgct

SEQ ID NO: 2216 - DNA, 50 bp, Homo Sapien
ggatttattaaaaccaagttgtccctaaggaatcagatgtgggcatctct

SEQ ID NO: 2217 - DNA, 50 bp, Homo Sapien
aaacacgagcacactctcttcgaacccaattgtgggtgtagcaatgaaag

SEQ ID NO: 2218 - DNA, 50 bp, Homo Sapien
cttgctcgctactttctagggtcttaatagtagtcaagaaaagggatctg

SEQ ID NO: 2219 - DNA, 50 bp, Homo Sapien
ggctaattctaagcactaaagtctacatctaagctatagatttaagcttg

SEQ ID NO: 2220 - DNA, 50 bp, Homo Sapien
tgctacgtgctcattagtgttcgtccgacgacgaccgtcatatgtccacc

SEQ ID NO: 2221 - DNA, 50 bp, Homo Sapien
tacaaaaacaaatgagcccgggatagtggcacaggcatgtagttccaact

SEQ ID NO: 2222 - DNA, 50 bp, Homo Sapien
aggatcagacggaaagcaggggagtttctcgggtcacccttgaagagagg

SEQ ID NO: 2223 - DNA, 50 bp, Homo Sapien
ttctttcacaccgtgtggtccgtgttactggtatacccagtatgttctca

SEQ ID NO: 2224 - DNA, 50 bp, Homo Sapien
ttgtttcttcttttaccatccttggcacttttagcggggggagaggaggt

SEQ ID NO: 2225 - DNA, 50 bp, Homo Sapien
cacgtctgtgatttgagaggtgagttatttaagaggccagttttcaggac

SEQ ID NO: 2226 - DNA, 50 bp, Homo Sapien
agggctcttcctcataacctcgatccgaatacactggcaaaggcaacact

SEQ ID NO: 2227 - DNA, 50 bp, Homo Sapien
agcatgatccccaccgctatggtctatctatgatcaccgtgctttgtgaa

SEQ ID NO: 2228 - DNA, 50 bp, Homo Sapien
tgagatgtacagagagtttcttgctgggtcaataggatagtatcattttg

SEQ ID NO: 2229 - DNA, 50 bp, Homo Sapien
acacttgaatcttggtcgttggtatgtaatccactctctagagtccagtg

SEQ ID NO: 2230 - DNA, 50 bp, Homo Sapien
ttatttttgctggtccctagaccactttgtatgaccgtttgcagtctgag

SEQ ID NO: 2231 - DNA, 50 bp, Homo Sapien
catgtttttactgatcattcgatatgctaaccgttctcagccctgagcct

SEQ ID NO: 2232 - DNA, 50 bp, Homo Sapien
ggaaagctgtagacatgcggctgcggatggagttgggtgctccagaagag

SEQ ID NO: 2233 - DNA, 50 bp, Homo Sapien
ttcaattgatgggagagtagttgagccaaaacgtgctgtagcaagagagg

SEQ ID NO: 2234 - DNA, 50 bp, Homo Sapien
aaagaaaagttgaagcgaatggaagtatcagaagtaccaaataatgttgg

SEQ ID NO: 2235 - DNA, 50 bp, Homo Sapien
ttcctactgtagggtagcggaaaagttgtcttaaaaggtatggtggggat

SEQ ID NO: 2236 - DNA, 50 bp, Homo Sapien
gtagaaacattttaggccatgtataagttacactgattttagcactaagc

SEQ ID NO: 2237 - DNA, 50 bp, Homo Sapien
ctgttttcagatgtgattgaggggtgttctgccctgcctccactgtcaca

SEQ ID NO: 2238 - DNA, 50 bp, Homo Sapien
tattgaaaatccaagacactatgccaatgcaaccgtgactactttgggag

SEQ ID NO: 2239 - DNA, 50 bp, Homo Sapien
cttagatcccccctcggagtagcggctcacgcaacacaaagtatagcaca

SEQ ID NO: 2240 - DNA, 50 bp, Homo Sapien
ggaaacctggcacgggccaacttttcccgattatcacgccaagaagttgc

SEQ ID NO: 2241 - DNA, 50 bp, Homo Sapien
atactcaggataagatccttgaatatggaacttagttacaggactcaata

SEQ ID NO: 2242 - DNA, 50 bp, Homo Sapien
atagatacatttcccgtatacttctgcgactatatctctctgtatttcta

SEQ ID NO: 2243 - DNA, 50 bp, Homo Sapien
cctgtatcacttggttgggggatcctaattcatctaaggtttggccttat

SEQ ID NO: 2244 - DNA, 50 bp, Homo Sapien
cggctttagttacgatgactacagttcccacgtgcgcaactctgcccttg

SEQ ID NO: 2245 - DNA, 50 bp, Homo Sapien
aaacctatagtgcacattttaactgccccctaaattacccttccctgggt

SEQ ID NO: 2246 - DNA, 50 bp, Homo Sapien
gagctaggtatagtgaccgtgaactttctaacgcataatattctgtgata

SEQ ID NO: 2247 - DNA, 50 bp, Homo Sapien
acgctccacccaaagccgaactggatgcccgattacacggtgatctggtt

SEQ ID NO: 2248 - DNA, 50 bp, Homo Sapien
tagtgtacttcttgtctatcctcagttaatttacctagacaaaaagtgtc

SEQ ID NO: 2249 - DNA, 50 bp, Homo Sapien
attcttaccattaagttaacaatggacgaagagatgacgctttgcttttt

SEQ ID NO: 2250 - DNA, 50 bp, Homo Sapien
ccttggcgtcgttttttgggtctgacttgtctcgtcaactgctggtctct

SEQ ID NO: 2251 - DNA, 50 bp, Homo Sapien
gttcctgctttgtttaataagaacctcatttaaacttgacagctatggta

SEQ ID NO: 2252 - DNA, 50 bp, Homo Sapien
aactttaatgatagagactaggatgcggaagcgagcgcccctccccgggg

SEQ ID NO: 2253 - DNA, 50 bp, Homo Sapien
aattttacatggaggaagtgagcacatgtcatgctagccaagaggacatt

SEQ ID NO: 2254 - DNA, 50 bp, Homo Sapien
atccccgcacaaagcggctctaaacctcaggccacatcttttccaaggca

SEQ ID NO: 2255 - DNA, 50 bp, Homo Sapien
gcttgtgcaaaaatgcgggctaactgtcagaagtctacagagcaaatgaa

SEQ ID NO: 2256 - DNA, 50 bp, Homo Sapien
agaaactggtataacatgccttcagtatactaacactcatatgctcagtt

SEQ ID NO: 2257 - DNA, 50 bp, Homo Sapien
acacaaacaagtggcccaggattgcctattggtttcaagggatggaatgg

SEQ ID NO: 2258 - DNA, 50 bp, Homo Sapien
gcctcccaggcgatctgcatactttaaggaccagatcatgctccatccag

SEQ ID NO: 2259 - DNA, 50 bp, Homo Sapien
catatatagatttctagaactccctctttgcatagtgccctcctttcttt

SEQ ID NO: 2260 - DNA, 50 bp, Homo Sapien
ctaaaatcagtgctatctacaagccgaaatttaagcaacaactgtgacac

SEQ ID NO: 2261 - DNA, 50 bp, Homo Sapien
ggtagagaaggatacagtgtctatcctcaagttgctacggttcagtgaga

SEQ ID NO: 2262 - DNA, 50 bp, Homo Sapien
cactttgaacgccttagaggcaaaaagagctttgtgagttgtaagaggaa

SEQ ID NO: 2263 - DNA, 50 bp, Homo Sapien
agacagatgacgcttttcgattctgcaccttgtatagctcctggagttgg

SEQ ID NO: 2264 - DNA, 50 bp, Homo Sapien
gccttccgcctataccgcaggctggttttggagaccccgagtcagaacat

SEQ ID NO: 2265 - DNA, 50 bp, Homo Sapien
tccaggtccgcaagaacaagcgtcggaggggctgtcccattctctgagat

SEQ ID NO: 2266 - DNA, 50 bp, Homo Sapien
aatgtcactattccaagtgtctttttagtgtggctttagtatggcttcct

SEQ ID NO: 2267 - DNA, 50 bp, Homo Sapien
caccagggaaagtgaacatgagttccgaattcctgcgtttcaagtgggga

SEQ ID NO: 2268 - DNA, 50 bp, Homo Sapien
tcgtcctgacacgattccaaaggtctgccatactcttcagaggagttcgg

SEQ ID NO: 2269 - DNA, 50 bp, Homo Sapien
aggaggtgggatatcacttccatgacataagtgctattgcagagccgtgg

SEQ ID NO: 2270 - DNA, 50 bp, Homo Sapien
caagttcagacgaagctactctggcatctgcacatttccgtgttacagca

SEQ ID NO: 2271 - DNA, 50 bp, Homo Sapien
atccttccttcgtctggctcgtgattcacttattcgccctccctactttg

SEQ ID NO: 2272 - DNA, 50 bp, Homo Sapien
agatgtggtttcccccattgtagcagggagctagcgtattagccttgtgg

SEQ ID NO: 2273 - DNA, 50 bp, Homo Sapien
tgtgcagaggtattcacaacattgtctgtgaccaagcgctctggggcaag

SEQ ID NO: 2274 - DNA, 50 bp, Homo Sapien
ggtcccctagttgaggatagtcaggagcgtcaatgtgcttgtacatagag

SEQ ID NO: 2275 - DNA, 50 bp, Homo Sapien
ggggttcagataatgcacgtgtttcgaatcccactgtgatatgccaggaa

SEQ ID NO: 2276 - DNA, 50 bp, Homo Sapien
caattatattaaactcggccaaaccctctgcgggataaaggggttttgtt

SEQ ID NO: 2277 - DNA, 50 bp, Homo Sapien
tcagtgcatttcacccaacgaaaagcagctacattagactgtgaaacaac

SEQ ID NO: 2278 - DNA, 50 bp, Homo Sapien
ggtctgtccagctttcacacattgatatgtgaggctacatttgcatgtta

SEQ ID NO: 2279 - DNA, 50 bp, Homo Sapien
gccggccagttaattcattctcagccaatgaaggtttgtctaagctgcct

SEQ ID NO: 2280 - DNA, 50 bp, Homo Sapien
taattttacaagttcttgtagtaggtagggggtactactagggatatctg

SEQ ID NO: 2281 - DNA, 50 bp, Homo Sapien
tctactccgccttcaatctgctcatgcattacccacccccctcgggagca

SEQ ID NO: 2282 - DNA, 50 bp, Homo Sapien
cttttttcggtgttagattcaacactgcgctaaagcggggatgttccatt

SEQ ID NO: 2283 - DNA, 50 bp, Homo Sapien
gtcaacgaaggcttgaaccaacctacggatgactcgtgctttgaccccta

SEQ ID NO: 2284 - DNA, 50 bp, Homo Sapien
agcagcgtcgctttgacctgttcgacttctgttaccacctgctaaaagtg

SEQ ID NO: 2285 - DNA, 50 bp, Homo Sapien
gtgagcagtaccaagagttccgtaaacagtgttacacggctttcctccac

SEQ ID NO: 2286 - DNA, 50 bp, Homo Sapien
ctctttttgtggatttgatgaccttatggatattgccaaagtttaaggca

SEQ ID NO: 2287 - DNA, 50 bp, Homo Sapien
ctgttctctgtataagttatggtatgcatgagctgtgtaaattttgtgaa

SEQ ID NO: 2288 - DNA, 50 bp, Homo Sapien
ctctgtatgtaacaatccatcattcaccttcactactggtagtaacatag

SEQ ID NO: 2289 - DNA, 50 bp, Homo Sapien
cccgtgttacaacgtggctcgcctaatgttcctcgatgcagagaggaaga

SEQ ID NO: 2290 - DNA, 50 bp, Homo Sapien
gactaataaaagtacaaggcacatatacgtgacagaattggtactcaatc

SEQ ID NO: 2291 - DNA, 50 bp, Homo Sapien
cgtacttagcagctatctctcagtgaactgtgagggtaaaggctatactt

SEQ ID NO: 2292 - DNA, 50 bp, Homo Sapien
atgtaatgacaatacatactaacattcttgtaggagtggttagagaagct

SEQ ID NO: 2293 - DNA, 50 bp, Homo Sapien
tctggtttagacttaatatgccacaacgcaccacgaccttcccagggtga

SEQ ID NO: 2294 - DNA, 50 bp, Homo Sapien
atcttcttgtcgtgaccccgatcacaaataacaaatgctcttaacactct

SEQ ID NO: 2295 - DNA, 50 bp, Homo Sapien
ctggatatacatagtctgcaatcaccaaagtataatatcttgtaaggcta

SEQ ID NO: 2296 - DNA, 50 bp, Homo Sapien
gaggttgcgacaagctactccaatacccctgctgggatagtgtcacagaa

SEQ ID NO: 2297 - DNA, 50 bp, Homo Sapien
caaagctgaaaccaaatctttataacaagggtggttaggtcagcattctt

SEQ ID NO: 2298 - DNA, 50 bp, Homo Sapien
ccatgcttgaaaatgtctgaatggcagtaatgaggataagttttttaatc

SEQ ID NO: 2299 - DNA, 50 bp, Homo Sapien
actcctattattcatcgcaagactcttctatagtaatccagttcaagata

SEQ ID NO: 2300 - DNA, 60 bp, Homo Sapien
aactgcggctggaagtcaacatgcaggcgctcaagggccagttcgaaagggatctccaag

SEQ ID NO: 2301 - DNA, 60 bp, Homo Sapien
acagagcagtaccagcgctctaaaagcacctccttgtcactttattactcccagaacaac

SEQ ID NO: 2302 - DNA, 60 bp, Homo Sapien
ggctaagatagatacttgtgaatcaaagatagcacagaaatgaactaagtatatcccatt

SEQ ID NO: 2303 - DNA, 60 bp, Homo Sapien
gtttcttaatcacgtgcggcggtgtctaagtggtgttaccagtgtacgcgcagtgacctt

SEQ ID NO: 2304 - DNA, 60 bp, Homo Sapien
taagctcattcttagtcgtagatagcttgggaatctcatatgcagagtatccatattgac

SEQ ID NO: 2305 - DNA, 60 bp, Homo Sapien
ttctcttaccatccgatattaagttgggcatgatccaactagtatcactaccttttgaag

SEQ ID NO: 2306 - DNA, 60 bp, Homo Sapien
ctgcattcacacatggcatgaaataagtcaggttctttacaaatggtattttgatagata

SEQ ID NO: 2307 - DNA, 60 bp, Homo Sapien
aggacagtatatgagatttctatcgtacagggcaagcctacattgtggacatattctaga

SEQ ID NO: 2308 - DNA, 60 bp, Homo Sapien
tcgcactctgtgtatataacctcgacagtcttggcacctaacgtgctgtgcgtagctgct

SEQ ID NO: 2309 - DNA, 60 bp, Homo Sapien
gccagtaaaggcacccctagctcttgggatgtttgtatccaactccgggcaatgtggggc

SEQ ID NO: 2310 - DNA, 60 bp, Homo Sapien
ataatttagaaacgtgatctcttgagagagagactacgcattgcctgggcactttcagat

SEQ ID NO: 2311 - DNA, 60 bp, Homo Sapien
gtgagaataaatttagctgcataaaacgttcggctcatttatctgacatcttagtcacat

SEQ ID NO: 2312 - DNA, 60 bp, Homo Sapien
gccctcagtctttttgggccttaggcgtttcgttcatcctgctaaggggatgaagcaaac

SEQ ID NO: 2313 - DNA, 60 bp, Homo Sapien
ggctgaagatacccgcttaaggatgctaacatttaccctggtactgccacattttctcta

SEQ ID NO: 2314 - DNA, 60 bp, Homo Sapien
tttcttgaaaacctcctgtagttcctgttgtgtacgggataaaggtgcttaccatggggc

SEQ ID NO: 2315 - DNA, 60 bp, Homo Sapien
cactatcgccgaaatatgcacaatcgcggtgtacgaggagcatacgccacacttatgatt

SEQ ID NO: 2316 - DNA, 60 bp, Homo Sapien
cctccaactaaccagtggtatcacggaaaacttgacagaacgatagcagaagaacgcctc

SEQ ID NO: 2317 - DNA, 60 bp, Homo Sapien
tactggtctgcatcaagtttattcggtagtttgaccgctagtatgttggaagttatttgg

SEQ ID NO: 2318 - DNA, 60 bp, Homo Sapien
cagcctgagtcagcaccaatcccgcattcagaacctcccagtgaaagggcagccttcatt

SEQ ID NO: 2319 - DNA, 60 bp, Homo Sapien
tttttatatttttcgtcacgttccccctgtagcctggaaagggacggtaacaattaaaga

SEQ ID NO: 2320 - DNA, 60 bp, Homo Sapien
tgtttaaccttatatgtacagtttcacatatgtataaaaacagtagtttgggggcctctt

SEQ ID NO: 2321 - DNA, 60 bp, Homo Sapien
tgcaaagttgaaaggccctaaatttaagatgccagacatgcacttcaaggcccccaagat

SEQ ID NO: 2322 - DNA, 60 bp, Homo Sapien
ttgccagctccgttcagagtgaaccatgcagtggaatggtaagtggcattataagcccca

SEQ ID NO: 2323 - DNA, 60 bp, Homo Sapien
accggggcttttcgtgagctcgtctctgatctcgcgcaagagtgacacacaggtgttcaa

SEQ ID NO: 2324 - DNA, 60 bp, Homo Sapien
tgggggtggaccgaatttggcaagaatgaaatggtgtcataaagatgggaggggagggtg

SEQ ID NO: 2325 - DNA, 60 bp, Homo Sapien
aaatatcagacgtcatattacacatagtatccgccccaaaaccgatgaacacacccagca

SEQ ID NO: 2326 - DNA, 60 bp, Homo Sapien
gaacatgcattcaacatcgccagatatcaattaggcatagagaaactactcgatcctgaa

SEQ ID NO: 2327 - DNA, 60 bp, Homo Sapien
atttcaccaagcgtggactactcttccgaggccgcatctcagagcggctcaagacaaggg

SEQ ID NO: 2328 - DNA, 60 bp, Homo Sapien
agagagatgatcgtgcctataaatagtaggaccaatgttgtgattaacatcatcaggctt

SEQ ID NO: 2329 - DNA, 60 bp, Homo Sapien
cgactaccaccgaacaccttccccgatgtgatcctcaactaaccgacaaaatatacacgg

SEQ ID NO: 2330 - DNA, 60 bp, Homo Sapien
tgactgaactgtgtctaagggtcggtcggtttaccactggacgggtgctgcatcggcaag

SEQ ID NO: 2331 - DNA, 60 bp, Homo Sapien
ggttgagtcataccaaatagtgatttcgatagttcaaaatggtgaaattagcaattctac

SEQ ID NO: 2332 - DNA, 60 bp, Homo Sapien
tcaaactgggttattcactgctgcacgtcagtcaactaatgcttatcctgacctaagaag

SEQ ID NO: 2333 - DNA, 60 bp, Homo Sapien
attgacatctgagcatactccagtttactaatacagcagggtaactgggccagatgttct

SEQ ID NO: 2334 - DNA, 60 bp, Homo Sapien
ccgctttaaggtccataaatatccctaaggaaaaatccaccgtggtacattcagtcctct

SEQ ID NO: 2335 - DNA, 60 bp, Homo Sapien
aagccatgttttatccttttctggagagtagtctagaccaagccaattgcagaaccacat

SEQ ID NO: 2336 - DNA, 60 bp, Homo Sapien
cctgcccgctgtagatgagaaactcagggacttgtacagcaaaagcacagcagccatgag

SEQ ID NO: 2337 - DNA, 60 bp, Homo Sapien
gtagcagtgtctgtaaaagagcctagtttttaatagctatggaatcaattcaatttggac

SEQ ID NO: 2338 - DNA, 60 bp, Homo Sapien
aatgtctttccttttgctcttaagttgtggagagtgcaacagtagcataggaccctaccc

SEQ ID NO: 2339 - DNA, 60 bp, Homo Sapien
gagttagaactattaaaacagccaaaactccacagtcaatattagtaatttcttgctggt

SEQ ID NO: 2340 - DNA, 60 bp, Homo Sapien
agtgatgttgtcttatagtctctatattctattcagtctcggcttgtcttttctagtggt

SEQ ID NO: 2341 - DNA, 60 bp, Homo Sapien
actggcagaaaacaacctgaaccttccaaagatggctgaaaaagatggatgcttccaatc

SEQ ID NO: 2342 - DNA, 60 bp, Homo Sapien
atgaggacatagtgacgctgcggacaggggaagtgaagtggtctgtaggtgagcacccag

SEQ ID NO: 2343 - DNA, 60 bp, Homo Sapien
aatctgtcctggtggaatgggttatacggtttctggcgttcatagacgcaggccaatcca

SEQ ID NO: 2344 - DNA, 60 bp, Homo Sapien
gatattctgcaacactgtacacataaaaaatacggtaaggatactttacatggttaaggt

SEQ ID NO: 2345 - DNA, 60 bp, Homo Sapien
tatttgcactgtagcctcgccgtctgtgaattggaccatcctatttaactggcttcagcc

SEQ ID NO: 2346 - DNA, 60 bp, Homo Sapien
cggataacagcgacaatcgaacgctgaccgcttagaccttcgtgagtagctcggtgtcgt

SEQ ID NO: 2347 - DNA, 60 bp, Homo Sapien
ccctaggaaggtgaatctgccctagcctggtttacggtttcttataactctcctttgctc

SEQ ID NO: 2348 - DNA, 60 bp, Homo Sapien
ctctcacttcgttggtgaccagtttcttaaactgaaagctttaatgttacatagtaaatg

SEQ ID NO: 2349 - DNA, 60 bp, Homo Sapien
gaagcagaatccaggtatggctggtggggcaagtaaggcgactctacttggctaagcctt

SEQ ID NO: 2350 - DNA, 60 bp, Homo Sapien
agaatcgattaaattcattaagcagaaacatggggctatccgctggtcaggggactttac

SEQ ID NO: 2351 - DNA, 60 bp, Homo Sapien
cagacgaatgtcagcgtcacataaaaagagcatgtaggatgggacatattgggatgtatt

SEQ ID NO: 2352 - DNA, 60 bp, Homo Sapien
agcggctccgatacatggttttccgatccatgctcagacaggatgtgagttggtttgatg

SEQ ID NO: 2353 - DNA, 60 bp, Homo Sapien
cttgcttcaaacggaatgacaagcgagaagtaaaggttgcccaattagctggatcagtgg

SEQ ID NO: 2354 - DNA, 60 bp, Homo Sapien
ccaacaccaactgcaaagtcgactcagagatgtagtctagccatgtgctcaggtacagac

SEQ ID NO: 2355 - DNA, 60 bp, Homo Sapien
gtacactgtacttctgtgtgcaattgtaaacagaaattgcaatatggatgtttctttgta

SEQ ID NO: 2356 - DNA, 60 bp, Homo Sapien
ttggtcatgagcatgctagtatgaataaggcaatgtgttaagcactggcatacaaatgca

SEQ ID NO: 2357 - DNA, 60 bp, Homo Sapien
tggagttcatcagagttatggtgccgaattgtctttggtgcttttcacttgtgttttaaa

SEQ ID NO: 2358 - DNA, 60 bp, Homo Sapien
tcttgctttcctcaaacaggatactgcctgctgtaagaccatcctctatggttgtacttt

SEQ ID NO: 2359 - DNA, 60 bp, Homo Sapien
cctggaactgtattttgaatccttaaaggtgagccctcatagggagatccaaagtcctgt

SEQ ID NO: 2360 - DNA, 60 bp, Homo Sapien
tgaatttccttatggtatacttgctgcttcggccttgtatcatttctcgtcatctgaatt

SEQ ID NO: 2361 - DNA, 60 bp, Homo Sapien
caggcaaggcacctgaattcccaccgcagagagtgttgtggccgtgaggacttttctgtc

SEQ ID NO: 2362 - DNA, 60 bp, Homo Sapien
cattgtggcattttagactcgttgagtttcttgggcactcccaagggcgttggggtcata

SEQ ID NO: 2363 - DNA, 60 bp, Homo Sapien
agaatgttctgggataacatttggaggaaggtgggaagcagatgactgaggaagggatgg

SEQ ID NO: 2364 - DNA, 60 bp, Homo Sapien
gttatagatcttgttcccccccgcacctttcccgccgcgttttggcttcttccctctgtt

SEQ ID NO: 2365 - DNA, 60 bp, Homo Sapien
ggcatcttctggcttgactggatggaaggagacttaggaacctaccagttggccatgatg

SEQ ID NO: 2366 - DNA, 60 bp, Homo Sapien
cagaataatgactgacttgtctaattcgtagggatgtgaggttctgctgaggaaatgggt

SEQ ID NO: 2367 - DNA, 60 bp, Homo Sapien
tgggtagtacctgtactaaaccacctcagaaaggattttacagaaacgtgttaaaggttt

SEQ ID NO: 2368 - DNA, 60 bp, Homo Sapien
ccaagcggcatagagaccgacttaatacagagttggaccgtttggctagcctgctgcctt

SEQ ID NO: 2369 - DNA, 60 bp, Homo Sapien
gaacaataaccattggtgactggagcaggtaattatagcctgcagaaaaaattatctaag

SEQ ID NO: 2370 - DNA, 60 bp, Homo Sapien
tttgggaatgtttgtctcatcccattctgcgtcatgcttgtgttataactactccggaga

SEQ ID NO: 2371 - DNA, 60 bp, Homo Sapien
agggaggcaagccctgttgacacaggtctttcctaaggctgcaaggtttaggctggtggc

SEQ ID NO: 2372 - DNA, 60 bp, Homo Sapien
agaggtaaaaagatgatggaaggtgtggtgactaagggccacggttattgggtgaaattt

SEQ ID NO: 2373 - DNA, 60 bp, Homo Sapien
cccaagattcacacctgactctgaaatctgaagacctcgagcagatgatgccaacctctg

SEQ ID NO: 2374 - DNA, 60 bp, Homo Sapien
tctcctttggaagtgaggcattgcacggggagacgtacgtatcagcggccccttgactct

SEQ ID NO: 2375 - DNA, 60 bp, Homo Sapien
gcattagttttggctgtcatcaacttattatatgactaggtgcttgctttttttgtcagt

SEQ ID NO: 2376 - DNA, 60 bp, Homo Sapien
gcaatatgtgatgtggcaaatctctattaggaaatattctgtaatcttcagacctagaat

SEQ ID NO: 2377 - DNA, 60 bp, Homo Sapien
aaggattggaagttgactgatgatacacaacgcactaggacttatgctcaaagctcaaaa

SEQ ID NO: 2378 - DNA, 60 bp, Homo Sapien
caaaccgagcgatcatgtcgcacaaacaaatttactattcggacaaatacgacgacgagg

SEQ ID NO: 2379 - DNA, 60 bp, Homo Sapien
atcgcgcgaccagctaaacactcctgcggtcgtatggtcgacaacaatcacacataaaat

SEQ ID NO: 2380 - DNA, 60 bp, Homo Sapien
gtcagtgtgattcacttaatgatatacattaattagaattatggggtcagaggtatttgc

SEQ ID NO: 2381 - DNA, 60 bp, Homo Sapien
tgaaggaatagggcggctttccttccagcgagcatcattcggctgttaccaaaacaaaca

SEQ ID NO: 2382 - DNA, 60 bp, Homo Sapien
ataaaaggttgtgtacaactccacgaggtgaaaaatattcagtaacttgtttacatagca

SEQ ID NO: 2383 - DNA, 60 bp, Homo Sapien
cattactgtatatactttgccttccataatcactcagtgattgcaatttgcacaagtttt

SEQ ID NO: 2384 - DNA, 60 bp, Homo Sapien
gagatcctcatttatgtttgtagttggaaagcaaagctaggtagccatttcttctgttct

SEQ ID NO: 2385 - DNA, 60 bp, Homo Sapien
gctatccctccgaattctcaacatacctcaacttctgccgctccctgcggtttgacgaca

SEQ ID NO: 2386 - DNA, 60 bp, Homo Sapien
ttgacttctgacattccactttcctaggttataggaaagatctgtttatgtagtttgttt

SEQ ID NO: 2387 - DNA, 60 bp, Homo Sapien
ggactctttacctcgcggcggaagaatatagctgcggagttagttaaacctcgctttccc

SEQ ID NO: 2388 - DNA, 60 bp, Homo Sapien
ccagcggctttgtgtgcaacacgtgccctgaaaagtggatcaatttccaacggaagtgct

SEQ ID NO: 2389 - DNA, 60 bp, Homo Sapien
ttttaacatcgacggtcaaggcaaccacgtcccgccctactacggaaactcggtcagggc

SEQ ID NO: 2390 - DNA, 60 bp, Homo Sapien
tttcttcctcgtttgttactttagagcaagtttgcccatagtcttgaatgcaatatttgt

SEQ ID NO: 2391 - DNA, 60 bp, Homo Sapien
catcttccagtaactgagcatacccagtgggccaacaagcacgctctaaatacaaaacca

SEQ ID NO: 2392 - DNA, 60 bp, Homo Sapien
ttggtcacgatccccgcctacccaccaatccttaacgcgcctcaccggaccttaacattc

SEQ ID NO: 2393 - DNA, 60 bp, Homo Sapien
cctgggtgaggtaaaggacattcatgaggtcaatgttctgggaataactctcttccctga

SEQ ID NO: 2394 - DNA, 60 bp, Homo Sapien
cctggggtaagccacccggctacctaattcctcagtaacctccatctaaaatctccaagg

SEQ ID NO: 2395 - DNA, 60 bp, Homo Sapien
gctgtgactgtcagggctatgctatgggccttctagactgtcttctatgatcctgccctt

SEQ ID NO: 2396 - DNA, 60 bp, Homo Sapien
aggtgggagagatgctgagcccagcgaatcctctccattgaaggattcaggaagaagaaa

SEQ ID NO: 2397 - DNA, 60 bp, Homo Sapien
ccatcttgtttcacactagtcacattcttgttttaagtgcctttagttttaacagttcac

SEQ ID NO: 2398 - DNA, 60 bp, Homo Sapien
gtgtccacactgactacattgtccccaacctgttttgagtagacacaccagctcctgttg

SEQ ID NO: 2399 - DNA, 60 bp, Homo Sapien
ggaagaagtgtaactcaccagcctctgctcttatctttgtaataaatgttaaagccagaa

SEQ ID NO: 2400 - DNA, 60 bp, Homo Sapien
atcaactacatggcggcggatggagacttcaagattaagtgcgtggcctttgagtgaagc

SEQ ID NO: 2401 - DNA, 60 bp, Homo Sapien
tccaaaaatgcacccaactagctctatgtttacaaatggacataggactcaaagtttcag

SEQ ID NO: 2402 - DNA, 60 bp, Homo Sapien
catgttcgtgccagaacatgttacaccactcctacgatggcttgcccgattcgatgcccc

SEQ ID NO: 2403 - DNA, 60 bp, Homo Sapien
ttaagtttgaaaatagttaccttcaaaggccaagagaattctatttgaagcatgctctgt

SEQ ID NO: 2404 - DNA, 60 bp, Homo Sapien
gccataatgtaaactgcctcaaattggactttgggcataaaagaacttttttatgcttac

SEQ ID NO: 2405 - DNA, 60 bp, Homo Sapien
tctgaacagtcactgtaaatcattcttaagcccagatatgagaacttctgctggaaagtg

SEQ ID NO: 2406 - DNA, 60 bp, Homo Sapien
agggcatttcaaatgacgagaagagctagtaatcacctgcacaaagggcgatggtggcgt

SEQ ID NO: 2407 - DNA, 60 bp, Homo Sapien
tatgcctcccgctatggcaaccgaaagaatgcgacgcctggcaagaaccgccggatttct

SEQ ID NO: 2408 - DNA, 60 bp, Homo Sapien
gtgccctattcacactctgggaagacgctaatctgtgacatcttttcttcaagcctgcca

SEQ ID NO: 2409 - DNA, 60 bp, Homo Sapien
gcctttggatttccacccactgagccctctagtactactagggcatactatggaaatatt

SEQ ID NO: 2410 - DNA, 60 bp, Homo Sapien
agagagatccttaacagctagtgcccattagggggctaaacctaaagcctgggtggtgat

SEQ ID NO: 2411 - DNA, 60 bp, Homo Sapien
atctctgtagacgaagctctgcgtcacccatacatcactgtttggtatgaccccgccgaa

SEQ ID NO: 2412 - DNA, 60 bp, Homo Sapien
gcttccatggctcaaataataccctgggtatgcaggacccactataccttgcatttgctg

SEQ ID NO: 2413 - DNA, 60 bp, Homo Sapien
gacattcttccttatgattataaccgtgttgaactctctgagataaacggagatgcaggg

SEQ ID NO: 2414 - DNA, 60 bp, Homo Sapien
ggcacgcgcaaaggctacctgagcaagcggagttcggacaacacaaaatggcaaaccaag

SEQ ID NO: 2415 - DNA, 60 bp, Homo Sapien
aagttttatatttggtacattactatggatggaatgtcaggtatgatgagtgggtgaagg

SEQ ID NO: 2416 - DNA, 60 bp, Homo Sapien
ctctagggagacctaataaacacaactgtgttactaattgatgctatactgagctgacaa

SEQ ID NO: 2417 - DNA, 60 bp, Homo Sapien
ctcataccaactatcggcaagaacgcaccgtttccgcacttcatttttaccccgcgcttc

SEQ ID NO: 2418 - DNA, 60 bp, Homo Sapien
aatgtgccgtgggttccacgccgtgtgcgcaagttccctgtgtgaaagcacgtctgtctt

SEQ ID NO: 2419 - DNA, 60 bp, Homo Sapien
caagctacggaacaggtgggcgcatgatgaactgcccaaagattctccggcagttgggaa

SEQ ID NO: 2420 - DNA, 60 bp, Homo Sapien
ttgacatcgagtggcgtgaccggcgcatcacactgagggcgtccaatggcaagtttgtga

SEQ ID NO: 2421 - DNA, 60 bp, Homo Sapien
attgcagagtggcctagagcactctcaccccaagcggccttttccaaatgcccaaggatg

SEQ ID NO: 2422 - DNA, 60 bp, Homo Sapien
tactaaaggcacttccttcctgttaaacccctgttaactctccataaatttggtgattct

SEQ ID NO: 2423 - DNA, 60 bp, Homo Sapien
ttcgcctgaccatccacttattctgccacccctgcatggtccccactgcacttaacaggg

SEQ ID NO: 2424 - DNA, 60 bp, Homo Sapien
ctgctttgtccaggtgagaacatccataatttggggccctgagttttacccagactcaag

SEQ ID NO: 2425 - DNA, 60 bp, Homo Sapien
ggaaccctttatacatcttggtcatcttgatctcataacgctggtataaggtggtctggt

SEQ ID NO: 2426 - DNA, 60 bp, Homo Sapien
ggattaaggcccttatgagaagaggccagaacttggttatcctcttccaatgtgaggaca

SEQ ID NO: 2427 - DNA, 60 bp, Homo Sapien
cttgttttggatgccccctaatccccttctcccctgcactgtaaaatgtgggattatggg

SEQ ID NO: 2428 - DNA, 60 bp, Homo Sapien
gtgccatccctgagagaccagaccgctccccaatactctcctaaaataaacatgaagcac

SEQ ID NO: 2429 - DNA, 60 bp, Homo Sapien
gctgggagcagttcactgatgcagttgtgtcctggctaaatcagaactcgaatggccttg

SEQ ID NO: 2430 - DNA, 60 bp, Homo Sapien
ctaaatgaaacaacaggggagatacaatattatctggttgcactaatcctgtgctgctta

SEQ ID NO: 2431 - DNA, 60 bp, Homo Sapien
tgatgctggatcttgccaagcgcagtcgcagtggtaaattccgcctcgtgaccaagttta

SEQ ID NO: 2432 - DNA, 60 bp, Homo Sapien
actcacagctgcatgatgaggtagaggtggcccccactctcatagatgtcatccagggct

SEQ ID NO: 2433 - DNA, 60 bp, Homo Sapien
tccttaagtcaaaagagagaagaggcaccactaaaagatcgcagtttgcctggtgcagtg

SEQ ID NO: 2434 - DNA, 60 bp, Homo Sapien
ctgtggttattcgaacctttattactagtgacttcatgactggtatacctgcaacacctg

SEQ ID NO: 2435 - DNA, 60 bp, Homo Sapien
tttgcccgtcagatttgaacgaatgtgtgtcccttgagcccaaggagagcggcaggaggg

SEQ ID NO: 2436 - DNA, 60 bp, Homo Sapien
cctataaggagatttcatattttgttgcggagttcataatgaataacacaggagaatgga

SEQ ID NO: 2437 - DNA, 60 bp, Homo Sapien
cgaatgggttggcttctccaataagttcggctttgggtatcaactgtccagccgccgtgt

SEQ ID NO: 2438 - DNA, 60 bp, Homo Sapien
tttatgagcaccatgtaagcctccttgtattgagataattgggcattaaacattaaactg

SEQ ID NO: 2439 - DNA, 60 bp, Homo Sapien
gtggttctgagcaaataactacagggtgcccattaccactcaagaagacacttcacgtat

SEQ ID NO: 2440 - DNA, 60 bp, Homo Sapien
cggcagcaatatcacccaagagccataatacacctattataagcgaccagcataataaag

SEQ ID NO: 2441 - DNA, 60 bp, Homo Sapien
cccctcccaaaaagaaattgataagtaaaagcttcgttatacatttgactaagaaatcac

SEQ ID NO: 2442 - DNA, 60 bp, Homo Sapien
gaagcggcaatcagcccgcgcgtggaaccgagacaagtaaacaagacgccagatctctga

SEQ ID NO: 2443 - DNA, 60 bp, Homo Sapien
tggcagccatcctttttaagagtaagttggttacttcaaaaagagcaaacactggggatc

SEQ ID NO: 2444 - DNA, 60 bp, Homo Sapien
gaggccctgtgcctagcacaaaataagggcataagaaatactagttacatcacaaggtca

SEQ ID NO: 2445 - DNA, 60 bp, Homo Sapien
ggttgttaaacagtaatagataagtgagacagattgcttgttatttatggtcaaatggtg

SEQ ID NO: 2446 - DNA, 60 bp, Homo Sapien
ctttctaacacgtcgccttcaactgtaatcacaacatcctgactccgtcatttaataaag

SEQ ID NO: 2447 - DNA, 60 bp, Homo Sapien
cccactcggtcccagttttgttgccccagaaagggatgttattatccttgggggctccca

SEQ ID NO: 2448 - DNA, 60 bp, Homo Sapien
tcagcctaccagctgctgccatacaggagattgtggccactgtgactctcaccagcagtg

SEQ ID NO: 2449 - DNA, 60 bp, Homo Sapien
tgcccgggaagtcgatcctgcttatatcaagattgaggaggtcattgggacaggctcttt

SEQ ID NO: 2450 - DNA, 60 bp, Homo Sapien
tcccatctttagaagcaatctaccatagttcaccctctggccacagtagttcacatcttt

SEQ ID NO: 2451 - DNA, 60 bp, Homo Sapien
tattccatcttctccataagtggagaaatgaaaagtaagaacagctcatcttcaaagttt

SEQ ID NO: 2452 - DNA, 60 bp, Homo Sapien
cttgttttacccatgttgggtcagcctgaaactgccaaccagtaggaagcatggactctc

SEQ ID NO: 2453 - DNA, 60 bp, Homo Sapien
agctagccaaaatctgtggcgttgaggacgcggtgtcagaaatgacacggcgagccatgg

SEQ ID NO: 2454 - DNA, 60 bp, Homo Sapien
gagcaagactgtccttttaagcactatggctgtgctgtaacggataaacggaggaacctg

SEQ ID NO: 2455 - DNA, 60 bp, Homo Sapien
cttgctgcatttgatcctctacaactggtgttgctcccgttatgcggacagaagacagcc

SEQ ID NO: 2456 - DNA, 60 bp, Homo Sapien
tggagaaatgcgagacaatccacgttgctattgtctgcgctggatacaatgccagccggg

SEQ ID NO: 2457 - DNA, 60 bp, Homo Sapien
ctttgctatcattctagggctggatttccctaactccagttattctgctgctgccgccat

SEQ ID NO: 2458 - DNA, 60 bp, Homo Sapien
aatgggctttgactggagaatcggagatgccttgtgtaggataactgcgctagtgtttta

SEQ ID NO: 2459 - DNA, 60 bp, Homo Sapien
gctaatcaaagcggcaacaagtgatctggaacactatgacaagactcgtcatgaagaatt

SEQ ID NO: 2460 - DNA, 60 bp, Homo Sapien
cagaggggccatgggttgtaggattgaggaacggaatctgccgactcacatgacagccca

SEQ ID NO: 2461 - DNA, 60 bp, Homo Sapien
tgctatttatactttgagttactcttcaaaagtggtatacctctagtttggagctgtgct

SEQ ID NO: 2462 - DNA, 60 bp, Homo Sapien
actcccccaagctgactcatcctaactaacagtcacgccgtgggatgtctctgtccacat

SEQ ID NO: 2463 - DNA, 60 bp, Homo Sapien
gcgggtttggcctcagataagcctccaggtatcattttggctgattgcttctttgctgga

SEQ ID NO: 2464 - DNA, 60 bp, Homo Sapien
agccaggtgactgaagtctgtgcggcaacctacatgatggggaatgagttgaccttccta

SEQ ID NO: 2465 - DNA, 60 bp, Homo Sapien
gggccttttgaacagtagtgtccccatgaagtgctagataatatatgtgtaagagtcagc

SEQ ID NO: 2466 - DNA, 60 bp, Homo Sapien
tcaggctcgagtcattagtgtcatgctataccgtaattaccttcgaagcatgcgcagaaa

SEQ ID NO: 2467 - DNA, 60 bp, Homo Sapien
ccttacctcaaaggctctcactaccgtggaccacctagtctgtaactctttctgaggagc

SEQ ID NO: 2468 - DNA, 60 bp, Homo Sapien
ccctgtagttgacaattctgcatgtactagtcctctagaaataggttaaactgaagcaac

SEQ ID NO: 2469 - DNA, 60 bp, Homo Sapien
ttcgggcaagttaaatgggacagccttccatgttcatttgtctacctcttaactgaataa

SEQ ID NO: 2470 - DNA, 60 bp, Homo Sapien
cagccccctgtagttgacaggtaagctgtaggcatgtagagcaattgtcccaatgccact

SEQ ID NO: 2471 - DNA, 60 bp, Homo Sapien
gtgcactggtaagcagacactgcactgaaccaactgctatgctcagaatgtaccagaaac

SEQ ID NO: 2472 - DNA, 60 bp, Homo Sapien
tgaaactcacctgctttgaattggcaccgaaaagtgggaataccggggagttgagatctg

SEQ ID NO: 2473 - DNA, 60 bp, Homo Sapien
gcgacagcattgattctcttagccatcttaagggaatctacctcaatctggctgccaaca

SEQ ID NO: 2474 - DNA, 60 bp, Homo Sapien
ctcgtccactcccccgctatccaacgtcacatctaagcactatgacatgcaccgaccgaa

SEQ ID NO: 2475 - DNA, 60 bp, Homo Sapien
actgcttcaactggcactcccccacgtacgagtatgcgttgagacatttgtacgtgctgg

SEQ ID NO: 2476 - DNA, 60 bp, Homo Sapien
ccattgctctgcatctctagcccactttatatcctgccaccagtacttcttgtaatccca

SEQ ID NO: 2477 - DNA, 60 bp, Homo Sapien
ctgtctgtagtgttgtggggtcctcccatggatcatcaaggtgaaacactttggtattct

SEQ ID NO: 2478 - DNA, 60 bp, Homo Sapien
ctgaataaaattgatgtgcatgttttagggatcaattacctaactgttccttggtctatt

SEQ ID NO: 2479 - DNA, 60 bp, Homo Sapien
tatgtaggcaggttaatcctccacttctcatgtggttgaaccagtgtgttttttggtaaa

SEQ ID NO: 2480 - DNA, 60 bp, Homo Sapien
taacctcttgatccctactcaccgagtgttgagcccaaggggggatttgtagaacaagcc

SEQ ID NO: 2481 - DNA, 60 bp, Homo Sapien
agacgaggttctcatcccgctgatcgttatacccgtcgttctgactgtcgccatggctgg

SEQ ID NO: 2482 - DNA, 60 bp, Homo Sapien
tgtagtcatatctgagcataagaccttgatgtgtgattcctgatgaccggtttcatttat

SEQ ID NO: 2483 - DNA, 60 bp, Homo Sapien
aatacaaagatctcggattatccatcacctcttgtacaattacaccccaagtccctcgtc

SEQ ID NO: 2484 - DNA, 60 bp, Homo Sapien
ttgcggctgagaatgcacttactggctcattcagcgggtgccaaagcctttgtctgtgat

SEQ ID NO: 2485 - DNA, 60 bp, Homo Sapien
tacaacacaacaccagcgcccaatatacgcgaatgaggcgccctatacccgcctctccac

SEQ ID NO: 2486 - DNA, 60 bp, Homo Sapien
tgtcctgagtctaagtggggtcatgctgaccgatgtaagtcccgagcccctccaagctct

SEQ ID NO: 2487 - DNA, 60 bp, Homo Sapien
gtacaattagttgcttattacgtatgattactcacagcgatctattgttccatataacca

SEQ ID NO: 2488 - DNA, 60 bp, Homo Sapien
atcctcatttataaacctggggtttgaactgcggtctccacgatcactgtcagctctcct

SEQ ID NO: 2489 - DNA, 60 bp, Homo Sapien
acagctttattacctcatgcgaactcatacaaaccaatagaatttcaacatgttctgtag

SEQ ID NO: 2490 - DNA, 60 bp, Homo Sapien
ggggatgatttacggcaagatatgctaacacttcaaattattcgtattatggaaaatatc

SEQ ID NO: 2491 - DNA, 60 bp, Homo Sapien
gccttcggagggaaattgtaaatcctgtgtttcattacttgaatgtagttatctattgaa

SEQ ID NO: 2492 - DNA, 60 bp, Homo Sapien
ctcagccgcagacaagtaatcactaacccgttttattctattcctatctgtggatgtgta

SEQ ID NO: 2493 - DNA, 60 bp, Homo Sapien
ttagcctacctagatttctcatgacgagttaatgcatgtccgtggttgggtgcacctgta

SEQ ID NO: 2494 - DNA, 60 bp, Homo Sapien
aagaagtccaatgcaccgcttgtcaatgtgaccctctactatgaagcactgtgcggtggc

SEQ ID NO: 2495 - DNA, 60 bp, Homo Sapien
atactggaaaccatcggaggcaaacagctcagagtcttcgtatatcgtacagctgtctgc

SEQ ID NO: 2496 - DNA, 60 bp, Homo Sapien
gccacgagggaactggcttacgctgttggcacatttccttccagacggttctccacagat

SEQ ID NO: 2497 - DNA, 60 bp, Homo Sapien
aagcttccatcagccaccgaatgcttaagaactcatctaagccagtcctctcattgattg

SEQ ID NO: 2498 - DNA, 60 bp, Homo Sapien
acactaccaaactgtcagtgaacccgccgttattaaacgattgattagtgtcttaaacaa

SEQ ID NO: 2499 - DNA, 60 bp, Homo Sapien
gtcatgaatgctcaggctaaaaagagtcttgatcaggatccagttgtacgtgctcaggaa

SEQ ID NO: 2500 - DNA, 60 bp, Homo Sapien
tcgatgagaatatgacccaaaggacactggtcaccaacgcagccatgcaagggataggat

SEQ ID NO: 2501 - DNA, 60 bp, Homo Sapien
aaacaggtccctgcctttttagaagcagcctcatggtctcatgcttaatcttgtctctct

SEQ ID NO: 2502 - DNA, 60 bp, Homo Sapien
ttcagctggctgcggcatgtgcttattgccgttggcctgctcacttgtatcaacctgctg

SEQ ID NO: 2503 - DNA, 60 bp, Homo Sapien
actcctagcacctggctagtttctaacatgttttgtgcagcacagtttttaataaatgct

SEQ ID NO: 2504 - DNA, 60 bp, Homo Sapien
ggaaccgtgaagcacgaggggaatatcaaatacgtgaacgacgtgaggaacatcacaaag

SEQ ID NO: 2505 - DNA, 60 bp, Homo Sapien
ttatgttcacagatattgctatcaatcgcagtagtctttcccctgtgtgaggctgaagcc

SEQ ID NO: 2506 - DNA, 60 bp, Homo Sapien
tgtctagcgggctcctcacactcaacatgtcctaaatgctgggtatcgcatgaagcactg

SEQ ID NO: 2507 - DNA, 60 bp, Homo Sapien
acaggttcacagttaagaaggaattttgcctctgaataaatagaatcttgagtctcatgc

SEQ ID NO: 2508 - DNA, 60 bp, Homo Sapien
ggccagtttactgatgagtatctcccagaacaacgatctcacctctacgggataactgca

SEQ ID NO: 2509 - DNA, 60 bp, Homo Sapien
tatatgtacttgtcacattggtgttggacacatttgcgccaaaagtatggtaattctatt

SEQ ID NO: 2510 - DNA, 60 bp, Homo Sapien
tccagcaaccctggttggggggtcagacttgatacactttcaggttgggagtggacccac

SEQ ID NO: 2511 - DNA, 60 bp, Homo Sapien
catcagcccatctccagcgctgtcccaattacagccctagcaagtggagacaacaagaag

SEQ ID NO: 2512 - DNA, 60 bp, Homo Sapien
aaaaatagacactccccgaagtcttttgttcgcatggtcacacactgatgcttagatgtt

SEQ ID NO: 2513 - DNA, 60 bp, Homo Sapien
ataaaaaactctagtccctttaaacgtttgcccctggcgtttcctaagtacgaaaaggtt

SEQ ID NO: 2514 - DNA, 60 bp, Homo Sapien
gaaatgagaacacggggtaactgcgatcattgcacttggtgttcacagtgggccaggcac

SEQ ID NO: 2515 - DNA, 60 bp, Homo Sapien
tgcaggagagacatcattgaattttttcaactgtatcagtagcacagtatttttgtatga

SEQ ID NO: 2516 - DNA, 60 bp, Homo Sapien
catgtttattatctaatcattccaagttttgcattgatgtctgactgccactcctttctt

SEQ ID NO: 2517 - DNA, 60 bp, Homo Sapien
tgtgagactgtgtgaagccgtttgtgtggtctccatgtaggtgctgtgttcccggcaccg

SEQ ID NO: 2518 - DNA, 60 bp, Homo Sapien
gatgaatggttaacacgagctagttaaacagtgccattgttttgccagtgaagcctccaa

SEQ ID NO: 2519 - DNA, 60 bp, Homo Sapien
agtggtttcgactggatatctcttttaacggaggccagatagtagtaaccactagcattg

SEQ ID NO: 2520 - DNA, 60 bp, Homo Sapien
agccacccatttgcttttaatccaaagaacatgtatagtttttgtacccagagactatga

SEQ ID NO: 2521 - DNA, 60 bp, Homo Sapien
taatgatgcgcttttgtcccgtaaatgttaacactcatgaagcataccccggcctctcag

SEQ ID NO: 2522 - DNA, 60 bp, Homo Sapien
agggaattctggttttagtccattggtagcattgtgtgtatgaggagattcaacaccaca

SEQ ID NO: 2523 - DNA, 60 bp, Homo Sapien
cagtcgctatgcagcactttcggaccagggactagacatcaaagcagcgttccaacctga

SEQ ID NO: 2524 - DNA, 60 bp, Homo Sapien
atagacacagacacttgcctatacagagacataaccacacacactcagaggatagtgaac

SEQ ID NO: 2525 - DNA, 60 bp, Homo Sapien
tcatcaacctacccaacctgtagctaagaatacctccatgagccctcgacagcgccgggc

SEQ ID NO: 2526 - DNA, 60 bp, Homo Sapien
aactggtatatgtcaggctttcccaatagcttaactgtgaccctatacggatggcttttt

SEQ ID NO: 2527 - DNA, 60 bp, Homo Sapien
gtcattgggtcgccacctcttaatccactcggaggaccagcgatctaactgtgctgtgtg

SEQ ID NO: 2528 - DNA, 60 bp, Homo Sapien
ctactgtgagtgcgaggagaagagactgtgcgtcaacactcatgtatggaccaaaagcaa

SEQ ID NO: 2529 - DNA, 60 bp, Homo Sapien
ttctgaatttctcacattcagagttccagtcattattgttacatcatgtttgcagaaacc

SEQ ID NO: 2530 - DNA, 60 bp, Homo Sapien
atctgaatccatgtcattcataaccccttgatctgtagtgtcatgggtgctgccgcaggc

SEQ ID NO: 2531 - DNA, 60 bp, Homo Sapien
tattttaattaactgtcgacgtgctgccacgtctgttgctatttgcccaccaataccata

SEQ ID NO: 2532 - DNA, 60 bp, Homo Sapien
tcatgcttctctgtttcacgtagttgggttgacaagtttctgcctttaagataaatgagt

SEQ ID NO: 2533 - DNA, 60 bp, Homo Sapien
atgcacaagtgcgaaggagttgcggttgctccatgttctgacttagggcaatttgattct

SEQ ID NO: 2534 - DNA, 60 bp, Homo Sapien
ggtcttggcgctcctgcttgtgtccgccgctctatccagtgttgtatcacggactgattc

SEQ ID NO: 2535 - DNA, 60 bp, Homo Sapien
atgaacggtccatgccgataagtaaacgtcgaacaattgcccttcaaccactccctctaa

SEQ ID NO: 2536 - DNA, 60 bp, Homo Sapien
gtcccagagccaggttgtgaaggttttccttcactgcggagcccttaggttatgaacatg

SEQ ID NO: 2537 - DNA, 60 bp, Homo Sapien
agaaaagtctcattgtggcagattgagcataaattattcaactgacggtgcaaaaacatt

SEQ ID NO: 2538 - DNA, 60 bp, Homo Sapien
agtttcaaacctactaatccagcgacaatttgaatcggttttgtaggtagaggaataaaa

SEQ ID NO: 2539 - DNA, 60 bp, Homo Sapien
cttagagttaccacaccccatgagggaagctctaaatagccaacacccatctgttttttg

SEQ ID NO: 2540 - DNA, 60 bp, Homo Sapien
tgcctgtagcccactctgctcgccttagcactaccactcctgcccaggaggattccattt

SEQ ID NO: 2541 - DNA, 60 bp, Homo Sapien
aaccacagaggcggaaataccggagggctttgccttgcgaaaagggttggacatcatctc

SEQ ID NO: 2542 - DNA, 60 bp, Homo Sapien
tgcttgagcaccagacaagcttggtatcttctgaggacggtgcccgagagcaggagaaca

SEQ ID NO: 2543 - DNA, 60 bp, Homo Sapien
aggtaccacaccgcttcagctcgccattatccgagagaggtcaagctgtgtgaaaatcct

SEQ ID NO: 2544 - DNA, 60 bp, Homo Sapien
tgtggaactccagtagagcctagtaagtacggataatggatcgcctgcttatgatgtgat

SEQ ID NO: 2545 - DNA, 60 bp, Homo Sapien
tgtgagtaagcgagacacaacacttgtcctcttggaggttacattcttgctggggggagg

SEQ ID NO: 2546 - DNA, 60 bp, Homo Sapien
agagttacactctcaactccgacctcgcccgcctaggtgtgcaggatctctttaacagta

SEQ ID NO: 2547 - DNA, 60 bp, Homo Sapien
tggtgtggaaaattacctggtgttgtagcgaagtagccatttccattctaacccagtcct

SEQ ID NO: 2548 - DNA, 60 bp, Homo Sapien
aagtccaaggtcatctctggcccagtgaccacagagagatctgcacctcccggacttcag

SEQ ID NO: 2549 - DNA, 60 bp, Homo Sapien
ttcatatcttttcacctatttccagtccttatcatagttgataaaaacctcagactcatc

SEQ ID NO: 2550 - DNA, 60 bp, Homo Sapien
taggtaattattgcagattgatgtctctcaatcccatgtattgcgcttatgttacaagtt

SEQ ID NO: 2551 - DNA, 60 bp, Homo Sapien
acgggagatttcttgttgctcaaaaaatgagctcgcatttgtcaatgacagtttcttttt

SEQ ID NO: 2552 - DNA, 60 bp, Homo Sapien
catattgtccgttttccggtattgagttagggaaagtatgcaggtattcctgtcattcct

SEQ ID NO: 2553 - DNA, 60 bp, Homo Sapien
agatcgccaactatgttgataagttttaccgatccttgaacatccggattgctctcgtgg

SEQ ID NO: 2554 - DNA, 60 bp, Homo Sapien
gctttcttgacatgtaggttgcttggtaataacctttttgtatatcacaatttgggtgaa

SEQ ID NO: 2555 - DNA, 60 bp, Homo Sapien
accctgtactgttctgtgtctttcacagctcctcccacaatgctgaatatacagcaggtg

SEQ ID NO: 2556 - DNA, 60 bp, Homo Sapien
gttggaagcttgttttccagtctcttgtacagcgttttaaaagaaatggattctatttat

SEQ ID NO: 2557 - DNA, 60 bp, Homo Sapien
gtgtgggccgtaaaaggaagggcaaaagctacactttagaatgcacgaggtccatctttc

SEQ ID NO: 2558 - DNA, 60 bp, Homo Sapien
caattgatgattattatactgatgccagtccgagtcctagactgaagtcagtaggaattc

SEQ ID NO: 2559 - DNA, 60 bp, Homo Sapien
cccaaaaaagaggccggagtgagagggagtgactattaacggcgggcgaaacgaaaataa

SEQ ID NO: 2560 - DNA, 60 bp, Homo Sapien
tcctttctgagaagttagtgttaaggtcttggaatgtgaacacattgtttgtagtgctat

SEQ ID NO: 2561 - DNA, 60 bp, Homo Sapien
taatccctgaaacgggcttcaggtcaaacccttaagacatctgaagctgcaacctggcct

SEQ ID NO: 2562 - DNA, 60 bp, Homo Sapien
atgcctgctatcctgactaatttaagtcattgctgactgcatagctctttttcttgagag

SEQ ID NO: 2563 - DNA, 60 bp, Homo Sapien
ctagagctgtttgttcaatcactgatgggcaaaggggagatgtagctaactggtggccct

SEQ ID NO: 2564 - DNA, 60 bp, Homo Sapien
tagtactcttcagcagagttccctgatggccttgtacagagaacccgatgattgatgagg

SEQ ID NO: 2565 - DNA, 60 bp, Homo Sapien
gggctaatctggctgagtagtcagttataaaagcataattgctttatattttggatcatt

SEQ ID NO: 2566 - DNA, 60 bp, Homo Sapien
cagctttaacaaaaaattggccgtcaaaacctgagtcctgtcctcttgccctcctccccg

SEQ ID NO: 2567 - DNA, 60 bp, Homo Sapien
aaaggaactcctgtcataaacattggatttcccgcggagtaacctggcgacatatttaga

SEQ ID NO: 2568 - DNA, 60 bp, Homo Sapien
gcagcgtgatgatacaacgtgttaatggttcattagcagtatctcgtgctctgggggact

SEQ ID NO: 2569 - DNA, 60 bp, Homo Sapien
atagctgctgtgcaaattggtagaccttataagaaggcacttgtttgtaagccagagaag

SEQ ID NO: 2570 - DNA, 60 bp, Homo Sapien
aagagcacagtcttgtttggagagtctacataattactttgcactaacatttgcaggatg

SEQ ID NO: 2571 - DNA, 60 bp, Homo Sapien
cagagtgaatgttacaggcatctatcgagctgtgcctattcgagtcaatccaagagtgag

SEQ ID NO: 2572 - DNA, 60 bp, Homo Sapien
tctggcaggtcaatgcttcccggacacggatcacttttgtctgattccagcctgcttgca

SEQ ID NO: 2573 - DNA, 60 bp, Homo Sapien
aaccatacatcatctatgctttgtagtatgactcctgtcactcagtacaattattttgag

SEQ ID NO: 2574 - DNA, 60 bp, Homo Sapien
ccacaacgagtgcaacaagcagcgcagccgtcataaatccaaggatcgctactgtgaaaa

SEQ ID NO: 2575 - DNA, 60 bp, Homo Sapien
tccactgggtcaaaccatacatcgcttcgtctctgtagtgatgacttcctgtcctctgct

SEQ ID NO: 2576 - DNA, 60 bp, Homo Sapien
catcctcggggtccagtgtctccctttgcataacctgctgcattgcattgacagtggagt

SEQ ID NO: 2577 - DNA, 60 bp, Homo Sapien
ctagaagaagacgaggtctacaatgccattcccatcatcatgggcagctctgtgggggct

SEQ ID NO: 2578 - DNA, 60 bp, Homo Sapien
gttgctctactatggagatcaacagttactgtgactgagtcggcccattctgtttagaaa

SEQ ID NO: 2579 - DNA, 60 bp, Homo Sapien
atgttaaccctgccgcgtggaatccccccgggaatcgaaattccgaacccaatgcagtcc

SEQ ID NO: 2580 - DNA, 60 bp, Homo Sapien
ttcctccaggtttttcaggggtcacttcacatttctaaagaaagagtgaataggctgggc

SEQ ID NO: 2581 - DNA, 60 bp, Homo Sapien
aacttagagtctaaaagatttctactggatcacttgtcaagatgcgccctctctggggag

SEQ ID NO: 2582 - DNA, 60 bp, Homo Sapien
caagaggggcgcgtttgtgtctcgggttaaaataaggttccgtccgcgtgctgggtcaga

SEQ ID NO: 2583 - DNA, 60 bp, Homo Sapien
gtcaaacatcacgaagacattggatgtggccccctgtgctgtggtcgcttcttggtcttg

SEQ ID NO: 2584 - DNA, 60 bp, Homo Sapien
acacgtctaccataagtatcgtaggcgctgccttaatgagcggaaacgcttgggcattgg

SEQ ID NO: 2585 - DNA, 60 bp, Homo Sapien
ttggtatgtagaaatatatctgatttgcatactggtcctttatccagcaaccttcttaaa

SEQ ID NO: 2586 - DNA, 60 bp, Homo Sapien
ttgcatgactgatagctgtaactcacagttaacatgctttcagtcaagtacagattgtgt

SEQ ID NO: 2587 - DNA, 60 bp, Homo Sapien
accgcactgtgttaaaccagatcctacggcagtccacgacccaccttgctgatgggcctt

SEQ ID NO: 2588 - DNA, 60 bp, Homo Sapien
gccatatcaggaaaataatgtcgagatatgtacttcttgcctttaagttttaacagccat

SEQ ID NO: 2589 - DNA, 60 bp, Homo Sapien
cgacttgcagagaaatgtctcgctgatgcgggagatcgacgcgaaataccaagagatcct

SEQ ID NO: 2590 - DNA, 60 bp, Homo Sapien
ttgagaaaccggcagttcccaagccagcgcctggctgttctctcattgtcactgccctct

SEQ ID NO: 2591 - DNA, 60 bp, Homo Sapien
gcgggtcgagtgctgtagttcgatttttgcgtgtgtgcgttgcttgcggcctttgtgcct

SEQ ID NO: 2592 - DNA, 60 bp, Homo Sapien
gatgctatttatgatccaagtttttacatcacatccattgatctgcctatcccttctttt

SEQ ID NO: 2593 - DNA, 60 bp, Homo Sapien
tgcaaaatgtgcacccatattttaagctgctttttcaggggataaatagtgtttggggac

SEQ ID NO: 2594 - DNA, 60 bp, Homo Sapien
aagggatttcttaggggatggtagacctttattgggtatcaagacatagcatccaagtgg

SEQ ID NO: 2595 - DNA, 60 bp, Homo Sapien
tcaaagcttaacttctgtaggttccaaggagacacccaaagcttcaccaaacccagacct

SEQ ID NO: 2596 - DNA, 60 bp, Homo Sapien
gacagagctataaactcaacccgaacacatttgtttgacagccgtcctcgttctccaaat

SEQ ID NO: 2597 - DNA, 60 bp, Homo Sapien
ggagatatttctgtaactcattctcttggtgctcacgattgccatggccatagggccaca

SEQ ID NO: 2598 - DNA, 60 bp, Homo Sapien
ttgatgagcggacaaagcttggagactatgccaacctaaaacaattctaccgagaccttg

SEQ ID NO: 2599 - DNA, 60 bp, Homo Sapien
cttcgtctgaaaaatgccaatattcaatcatcatgcagcattataacaagccttataagt

SEQ ID NO: 2600 - DNA, 60 bp, Homo Sapien
gttttcagggagtacacaggtagattagtttgaagcattgaccttttatttattccttat

SEQ ID NO: 2601 - DNA, 60 bp, Homo Sapien
agtcaatacctgttagtgttaggctattaacaatagttaggtgaaaggtaatgagggcat

SEQ ID NO: 2602 - DNA, 60 bp, Homo Sapien
tactacgcaaacgcttacagcttttggctcgccaccatagagaggagcgagatgttcaag

SEQ ID NO: 2603 - DNA, 60 bp, Homo Sapien
cttttattccgggcgtcttggtagtttctggtgggattcagtgggtgagagggaagaagg

SEQ ID NO: 2604 - DNA, 60 bp, Homo Sapien
tttctccaatctcatgtccattttggtgtgggagtcggggtagggggtactcttgtcaaa

SEQ ID NO: 2605 - DNA, 60 bp, Homo Sapien
gcacctgggtcagtattagtctatttatcagaggtgtaaataatctatgtatagtttttc

SEQ ID NO: 2606 - DNA, 60 bp, Homo Sapien
tcacatttgcatcatagacgagacagtccattcatcttagttaaattggattgagaatgc

SEQ ID NO: 2607 - DNA, 60 bp, Homo Sapien
cttagctgggtcttccactcctaacggaattgagctcgttgatctgggatccaaaggtaa

SEQ ID NO: 2608 - DNA, 60 bp, Homo Sapien
cctcctgggattaatggtagtcctggtggtaaaggcgaaatgggtcccgctggcattcct

SEQ ID NO: 2609 - DNA, 60 bp, Homo Sapien
agggacctacacacagaggagtgaacttagggttctagggactatggccgggtcaccggt

SEQ ID NO: 2610 - DNA, 60 bp, Homo Sapien
tatccacttgcctggtagaagtagcttgaaggtgagagagataaacaattgtcctcttcc

SEQ ID NO: 2611 - DNA, 60 bp, Homo Sapien
ctagcagcttcaacccagtcctccttaccttgcacctattaacgttggttcaacatgaag

SEQ ID NO: 2612 - DNA, 60 bp, Homo Sapien
gaaaaggttagtctttcagtacacgttactggtaagtagtttccaagttacgtgttgtca

SEQ ID NO: 2613 - DNA, 60 bp, Homo Sapien
ggaagaaagtccatgagactttctgactaggaaaccatgtggtttgaacttgaagaaaaa

SEQ ID NO: 2614 - DNA, 60 bp, Homo Sapien
catgctaattcactctagttcaaatccacattctagttgaatccctgcaatgtaacttga

SEQ ID NO: 2615 - DNA, 60 bp, Homo Sapien
ctgtggatttaaacaaattgcgaaaagatgctagttctcaagactgctatgatattccac

SEQ ID NO: 2616 - DNA, 60 bp, Homo Sapien
catgatgagggatgggatgaaggcagcaaggggtaaccatcttgaccttctgttttttct

SEQ ID NO: 2617 - DNA, 60 bp, Homo Sapien
ccaactgcgtaaacatattgagtaccggttgaaagtgtctctaccttgtgatctcggagc

SEQ ID NO: 2618 - DNA, 60 bp, Homo Sapien
tctaattggatgtgctttcgcctttgcatgtaagtacggtagtaagaaacctttgagatc

SEQ ID NO: 2619 - DNA, 60 bp, Homo Sapien
agatgaaaacccccatgatggtgaattgaccttcttaggaagagttttagcccaacttcc

SEQ ID NO: 2620 - DNA, 60 bp, Homo Sapien
gaaagcattcattatgtccggagtgtctttttactcatctgatacaggtaattaaaagaa

SEQ ID NO: 2621 - DNA, 60 bp, Homo Sapien
tccaccatgaatctttcgaaatatgttgatcccgtcattagcaagcggctctcctcttca

SEQ ID NO: 2622 - DNA, 60 bp, Homo Sapien
tccaacaagatcccccgtctgaggactgacctttttccaaagacgagaatccaggacttg

SEQ ID NO: 2623 - DNA, 60 bp, Homo Sapien
aaatacatgctgacgtggttccagcgtagtcaggaaagtctggctagaaagatggcccag

SEQ ID NO: 2624 - DNA, 60 bp, Homo Sapien
agttgtgtgaataccccaagactcccatgagggagatgccatgagccgcccaaggccttc

SEQ ID NO: 2625 - DNA, 60 bp, Homo Sapien
cacccccttactctgctataatttctccttaataggacactgtataacttattttcttat

SEQ ID NO: 2626 - DNA, 60 bp, Homo Sapien
catagtgaccggctgcttttccctaagccaagggcctcttgcggtcccttcttactcaca

SEQ ID NO: 2627 - DNA, 60 bp, Homo Sapien
gccaccacggcgttgtacctgtaggactctcattcgggatgattggaatagcttctggaa

SEQ ID NO: 2628 - DNA, 60 bp, Homo Sapien
gtttgctccaccagatttaaccaaatgtaactcccacattgagtttatctatattgaaaa

SEQ ID NO: 2629 - DNA, 60 bp, Homo Sapien
gttcacacctgatttttaagacttagaataaggaggtggggaatgtgaaatatctcattt

SEQ ID NO: 2630 - DNA, 60 bp, Homo Sapien
acaaataagcgagaaccgcgacgagcaccacataagccgtaggaccgcatgaaagaagag

SEQ ID NO: 2631 - DNA, 60 bp, Homo Sapien
aaacattaccctaatgaggacgcccctaaatcgggtactagttgcagctctcgctgttca

SEQ ID NO: 2632 - DNA, 60 bp, Homo Sapien
accaggaaccaccttggcaagatatttacccaccggccatctctgtttactcatgaatgt

SEQ ID NO: 2633 - DNA, 60 bp, Homo Sapien
acttactcttcaacttaatggcagactgtgatcgctaactgcatctggcacaaaaacatg

SEQ ID NO: 2634 - DNA, 60 bp, Homo Sapien
gtgtttaaagagggtcaagtggaggtgcatattccagagaatgctcccgtaggtacctct

SEQ ID NO: 2635 - DNA, 60 bp, Homo Sapien
tacttggagatagtcacattagtacataggtgtcctttgcaactgctgtcaactctacat

SEQ ID NO: 2636 - DNA, 60 bp, Homo Sapien
ggggagataaatcagacttaacatgtatgtaagatcaattcacttaaaagtatggtccaa

SEQ ID NO: 2637 - DNA, 60 bp, Homo Sapien
tggtaagtgaactgaaaattccagtcactcttgggctagactcaacgttcttaaaaacta

SEQ ID NO: 2638 - DNA, 60 bp, Homo Sapien
ttaacatcacgtctttgtctctagtgcagtttttcgagatattccgtagtacatatttat

SEQ ID NO: 2639 - DNA, 60 bp, Homo Sapien
agcaggggactgatggctatagcagaatgaggtcgggtcaggaccctcaaacaccatctg

SEQ ID NO: 2640 - DNA, 60 bp, Homo Sapien
ttaactgaaaccggtactgatttggaagcagtagctaagtttcttgatgcttctggagca

SEQ ID NO: 2641 - DNA, 60 bp, Homo Sapien
acttacgtacgtggcataacacatcgtgtgagcccatgtatgctggggtagagcaagtag

SEQ ID NO: 2642 - DNA, 60 bp, Homo Sapien
tatccacctggtacctaagtcttgtcatggacttacaggtttgcatgggttccaaatact

SEQ ID NO: 2643 - DNA, 60 bp, Homo Sapien
tgagttctgtttgctccttgtaccaccatccaaatggtgttatcaaatctcttagattcc

SEQ ID NO: 2644 - DNA, 60 bp, Homo Sapien
ttttagttctctagggtctgataggaacagacctgaggcttatctttgcacatgttaaag

SEQ ID NO: 2645 - DNA, 60 bp, Homo Sapien
taagagtggcttgggatgctgtgtcccaaggaatttcttttcacctcttggaagggctgg

SEQ ID NO: 2646 - DNA, 60 bp, Homo Sapien
gacctctttgataggaatgtttgatagtgatgtcaacaagctaaatgtcagtcagcagcc

SEQ ID NO: 2647 - DNA, 60 bp, Homo Sapien
ccacggagaatacaacaacgatgcggcacgaggaaaagctggagtcagggaacaaccaga

SEQ ID NO: 2648 - DNA, 60 bp, Homo Sapien
ggggttgggagtgttagtaatcaaggtttagaacaccatgagatagttacccctgatctc

SEQ ID NO: 2649 - DNA, 60 bp, Homo Sapien
tggttaattctgtccaacaaacacacacgggtagattgctggcctgttgtaggtggtagg

SEQ ID NO: 2650 - DNA, 60 bp, Homo Sapien
cccacttctctatgtaacgatataagctatcggagggtggtaccgatcaggaacgctttt

SEQ ID NO: 2651 - DNA, 60 bp, Homo Sapien
atctcttctgttgccctcgctaggttctccctggtgggttagtgctttgtatctgtctct

SEQ ID NO: 2652 - DNA, 60 bp, Homo Sapien
tttccagttgcactgtatctctggaagtgatgcatgaattcgattggattgtgtcatttt

SEQ ID NO: 2653 - DNA, 60 bp, Homo Sapien
atatgtcacactccttaatagggacctgtgactccttaataaggacctgtgacatgccca

SEQ ID NO: 2654 - DNA, 60 bp, Homo Sapien
gattccctggagttcagtactgtaggaggatgggtatctactcgcgcatcaggcatgaag

SEQ ID NO: 2655 - DNA, 60 bp, Homo Sapien
acctaacaaaggcgtaggagtaacctcgcactttgctagctaacctgactccgggtgagg

SEQ ID NO: 2656 - DNA, 60 bp, Homo Sapien
tcagtattcgggagtaccttggtggatcatcctagtggctattctcgctgggatcttgat

SEQ ID NO: 2657 - DNA, 60 bp, Homo Sapien
aatgtaaggcagatgacgtgatctttaagactgctatatatatcagtctcttactctata

SEQ ID NO: 2658 - DNA, 60 bp, Homo Sapien
aggctgcattggggccaaacacagaatcagcaaagaggaggccatgcgctggttccagca

SEQ ID NO: 2659 - DNA, 60 bp, Homo Sapien
ttaagccttcgcagtttccacgtggcattgagcgttcgagtgcacagaactagaagtcaa

SEQ ID NO: 2660 - DNA, 60 bp, Homo Sapien
aatccagtgctatccagtccataagccacgtatgacgttatcaaggttgaccagagtggg

SEQ ID NO: 2661 - DNA, 60 bp, Homo Sapien
gatcatataaacatgaccgagttgtacctcagagtcgagcttctgcacaaataataagtt

SEQ ID NO: 2662 - DNA, 60 bp, Homo Sapien
ctgctaaaatagaatatagcatctttcatatggtaggaaccaacaaggaaactttccttt

SEQ ID NO: 2663 - DNA, 60 bp, Homo Sapien
tgtggcttgttctgcccatgtagactcaggtatatgaggacgttctgagtgggggtttgg

SEQ ID NO: 2664 - DNA, 60 bp, Homo Sapien
aatccacccggcgtgactcatttcaacactaagtactaggggtgttgtcaggagacaaat

SEQ ID NO: 2665 - DNA, 60 bp, Homo Sapien
tcttatcttccatggatgctttaattggaagtgggttgccgacccccttgtgcctagaaa

SEQ ID NO: 2666 - DNA, 60 bp, Homo Sapien
ttagccacatggtgagaccgtggtgaaagggggatggaaattgcttggccagtctttgcc

SEQ ID NO: 2667 - DNA, 60 bp, Homo Sapien
catttctgggaatggttaaacacaaaaggctgatagctggtatcacatagttggagtcag

SEQ ID NO: 2668 - DNA, 60 bp, Homo Sapien
agggggcaaaggggagaacccccacatggtgaagaacttttcccgcgcactttttaaagg

SEQ ID NO: 2669 - DNA, 60 bp, Homo Sapien
ggctaggacagggtctcggactagggaagtggtttctctgcttaaaaagggtcagggtgg

SEQ ID NO: 2670 - DNA, 60 bp, Homo Sapien
ttgaatataagattcccaaacagaggagcataacacattcctagtacctaagttccaggt

SEQ ID NO: 2671 - DNA, 60 bp, Homo Sapien
cctcagaatagtgatgtgttcgacgttttatcaaaggccccctttctatgttcatgttag

SEQ ID NO: 2672 - DNA, 60 bp, Homo Sapien
ctgtacagtgaattttccgaacctctcaaagtatgttttccgttcttccacagaaatatg

SEQ ID NO: 2673 - DNA, 60 bp, Homo Sapien
tttgccatcagccgggtccagatgaatttcctgcacctgctaagctccgaggtgacccag

SEQ ID NO: 2674 - DNA, 60 bp, Homo Sapien
aagcagtctgtcggatcctgtggggatagacgggcatttccctcgttgccccccttttta

SEQ ID NO: 2675 - DNA, 60 bp, Homo Sapien
ccctcattagcggattccgttccattatcaaacccgagtggatccgaatgttctcaactc

SEQ ID NO: 2676 - DNA, 60 bp, Homo Sapien
gatttatgaaggtacttcacaaattcaaagacttattgtagcccgtgaacacattgacaa

SEQ ID NO: 2677 - DNA, 60 bp, Homo Sapien
cgccttcgacgagcccaaagtagaactgcatgtccacctagacggatccatcaagcctga

SEQ ID NO: 2678 - DNA, 60 bp, Homo Sapien
ggaagtttacatcctcctaaattggataggctatgtcaattctggtttcaatccccttat

SEQ ID NO: 2679 - DNA, 60 bp, Homo Sapien
attggattccctattcgtagccatctccgtggccaatgtgactaccgtgccagcagcggg

SEQ ID NO: 2680 - DNA, 60 bp, Homo Sapien
tcatggagaaattggaattcttcgatttttcttatgaccttaacctgtgtgggctgacag

SEQ ID NO: 2681 - DNA, 60 bp, Homo Sapien
cttttgccgtataaatagggcagatccgggatttgttattttagcaccacggcagcagga

SEQ ID NO: 2682 - DNA, 60 bp, Homo Sapien
ttgaactcaggaaaccctcaaataggccagaacaactcactaattaaattcatcccctcc

SEQ ID NO: 2683 - DNA, 60 bp, Homo Sapien
ggctttaaatcctcgaacacaaactcatgcaactctgtgttccacttcggccaagaaatt

SEQ ID NO: 2684 - DNA, 60 bp, Homo Sapien
catgtccttgatccagacaaagtgtgccgacgacgccatgaccctggtactaaagaaaga

SEQ ID NO: 2685 - DNA, 60 bp, Homo Sapien
ccttttgagctattgcacacgcctgaaaagtgggtgaggttcaagtacccaaagctcatc

SEQ ID NO: 2686 - DNA, 60 bp, Homo Sapien
gtcagtgcaaaaacaatgccagagctgtacgaccttgttaacagctataaacctgatctg

SEQ ID NO: 2687 - DNA, 60 bp, Homo Sapien
ctatgataaaccggcaggagattggtggacctcgctcttataccatcgcagttgcttccc

SEQ ID NO: 2688 - DNA, 60 bp, Homo Sapien
gaaaaattgacagcgtatgccatgactattccatttgtcaggcaacaggtttacaaaaaa

SEQ ID NO: 2689 - DNA, 60 bp, Homo Sapien
gcagtcaattttcacatcaaagacagcatctaagaagttttgttctgtcctggaattatt

SEQ ID NO: 2690 - DNA, 60 bp, Homo Sapien
ggaacaagttgagctatgacttaacatagccaaaatgtgagtggttgaatatgattaaaa

SEQ ID NO: 2691 - DNA, 60 bp, Homo Sapien
ttgctttttagcaaatctgctgtggcaggctgtggattttgagagtcaggggaggggtgt

SEQ ID NO: 2692 - DNA, 60 bp, Homo Sapien
ggagtaggaattaagtgaaaggtcacactaccattatttccccttcaaacaaataatatt

SEQ ID NO: 2693 - DNA, 60 bp, Homo Sapien
tttgtcacacactttggctattagagatcaaccccttcgctcctgtgtcttgcaatggca

SEQ ID NO: 2694 - DNA, 60 bp, Homo Sapien
tggagggactgcctatcttcattcttcgactagccactgaggtgaattgggacgaagaaa

SEQ ID NO: 2695 - DNA, 60 bp, Homo Sapien
tgttgcagagcttgctaatttccctaagcatgtaatagagtgtgctaaacagaaagccct

SEQ ID NO: 2696 - DNA, 60 bp, Homo Sapien
ctgcacctaatccccataacttccagtatcattttccaattaattatcaagtctgttttg

SEQ ID NO: 2697 - DNA, 60 bp, Homo Sapien
gaaagctgctttcgaataaagtgaatacattttgcacaaagtaagcctcacctttgcctt

SEQ ID NO: 2698 - DNA, 60 bp, Homo Sapien
ttcgggccttcccgctaaaataagaataaggttaagtaccaattctgccgacaaaggcag

SEQ ID NO: 2699 - DNA, 60 bp, Homo Sapien
agtgggttacgggagacaacaacaccagctatagcaggtgggcacggctcgacctcaatg

SEQ ID NO: 2700 - DNA, 60 bp, Homo Sapien
tcataaaattggcatcaattttaatgacgctcctggtatggaacctcagatataccctat

SEQ ID NO: 2701 - DNA, 60 bp, Homo Sapien
acctccagtcccttgagaccccacgtcatgtagagaagttaacggcccaagtggtgggca

SEQ ID NO: 2702 - DNA, 60 bp, Homo Sapien
cgtacgtttcctgagaagtgtctaaaaacaccaaaaagggatccgtacattcaatgttta

SEQ ID NO: 2703 - DNA, 60 bp, Homo Sapien
agggaaggcgggaaccttgggttgagtaatgctcgtctgtgtgttttagtttcatcacct

SEQ ID NO: 2704 - DNA, 60 bp, Homo Sapien
tgactgggatcccgtgtaccgagtacacgacccaggtatgtaccaagtaggcacccttgg

SEQ ID NO: 2705 - DNA, 60 bp, Homo Sapien
tagggcaaccacttatgagttggtttttgcaattgagtttccctctgggttgcattgagg

SEQ ID NO: 2706 - DNA, 60 bp, Homo Sapien
gccaggcctcatacatactatttactggttctctttctgcgggtgctccaccaagaattc

SEQ ID NO: 2707 - DNA, 60 bp, Homo Sapien
ccgggtaggtgatgggtaacattccttaaatggtgcatgtcactggcctttcagctggga

SEQ ID NO: 2708 - DNA, 60 bp, Homo Sapien
tcaagcaaccctttggattatgcccatgaacaagttagtttctcatagctttacagatgt

SEQ ID NO: 2709 - DNA, 60 bp, Homo Sapien
atctcttgtatatgatgatctggatccaccaagacttgttttatgctcagggtcaatttc

SEQ ID NO: 2710 - DNA, 60 bp, Homo Sapien
ataagaagaactgtgcggcacagcgcccgctactacagctcgtcacacggtgttgtccga

SEQ ID NO: 2711 - DNA, 60 bp, Homo Sapien
atattgaagagttctgcaatcgtagctgcgaggtgccaacaaggctaaattctgcatccc

SEQ ID NO: 2712 - DNA, 60 bp, Homo Sapien
ccattgtgggctccgacatgcaggaagtcatcggcacggccattgcattcaatctgctct

SEQ ID NO: 2713 - DNA, 60 bp, Homo Sapien
caggggagttgtgtctgtaatcgccctactattcagtggcgagaaataaagtttgcttag

SEQ ID NO: 2714 - DNA, 60 bp, Homo Sapien
acactcagcgggcctaggcacgcgtggctcttgttgccttagctgaaatttctgttgtgc

SEQ ID NO: 2715 - DNA, 60 bp, Homo Sapien
ctacactggattgatcaactatgatggcctattacgagtggcacatctctatataatggg

SEQ ID NO: 2716 - DNA, 60 bp, Homo Sapien
gccccagataggtggtgccagtggcttattaattccgatactagtttgctttgctgacca

SEQ ID NO: 2717 - DNA, 60 bp, Homo Sapien
gattttgtagccaacattcattcaatactgttatatcagaggagtaggagagaggaaaca

SEQ ID NO: 2718 - DNA, 60 bp, Homo Sapien
ccttttatatcactaaaataagatcatgttttaattgtgagaaacagggccgagcacagt

SEQ ID NO: 2719 - DNA, 60 bp, Homo Sapien
tgtctaaaagttaaagcagcactacttacgtcatggaaaattggtgtctatagtccagta

SEQ ID NO: 2720 - DNA, 60 bp, Homo Sapien
agactttccatatcaagagacatggtattgactcaacagtttccagtcatggccaaatgt

SEQ ID NO: 2721 - DNA, 60 bp, Homo Sapien
tgtgacagcagggataacacactgcaagtggacatcaacgggttcactaccggccgccga

SEQ ID NO: 2722 - DNA, 60 bp, Homo Sapien
gatcctggaaagtaagcgcaaggctactctctaatgctaactcttatgtatgtaagaggt

SEQ ID NO: 2723 - DNA, 60 bp, Homo Sapien
ctctaccctggtaggaaagcaccgcagcatgtggggaagcaagacgtcctggaatgaagc

SEQ ID NO: 2724 - DNA, 60 bp, Homo Sapien
acctgcgatgagaaggtcgtctggactgtgttccgggagcccattcagcttcacagagaa

SEQ ID NO: 2725 - DNA, 60 bp, Homo Sapien
agtgcgctctggtcgtctacaccctgaaaccctttgagttcgagtccgcttgctggtgct

SEQ ID NO: 2726 - DNA, 60 bp, Homo Sapien
cctcgtaggccacaggggaaaaaggtccatttgtctcaccgggaggctcaatattgcctg

SEQ ID NO: 2727 - DNA, 60 bp, Homo Sapien
gcttgtacacaatggacggtatcaccgtgactgtggccgacctgttctttgcggggacag

SEQ ID NO: 2728 - DNA, 60 bp, Homo Sapien
ccatattgcgcacaaacacccctatcacgaaaattacaccccccaacggcaacttttaca

SEQ ID NO: 2729 - DNA, 60 bp, Homo Sapien
agcggatgctatggtgccggggcgacaaggtcgcaactataatctaaccgccttgctgct

SEQ ID NO: 2730 - DNA, 60 bp, Homo Sapien
agacgtttagcgggatcatgactatgttgaatatgcagtttgttgtacgagtgaggagat

SEQ ID NO: 2731 - DNA, 60 bp, Homo Sapien
ataagacatttcgggatgcatttggccgatatatcacctgcaattaccgggccacaaagt

SEQ ID NO: 2732 - DNA, 60 bp, Homo Sapien
gtgacatatgtatctatacatccgtatcttttaatgatccgtgtgtaccatctttgtgat

SEQ ID NO: 2733 - DNA, 60 bp, Homo Sapien
tggctcgccaacgcttcagtgatcaatcccggggcgatttacagatgcaggatcggaaag

SEQ ID NO: 2734 - DNA, 60 bp, Homo Sapien
tcagggcttcatcgtggggctctcagttccgatttcccaggctgaattgggagtgagatg

SEQ ID NO: 2735 - DNA, 60 bp, Homo Sapien
tcctgcaatgttaaccttggtcagcactcggcacacccctgcgcggtgcacataacagca

SEQ ID NO: 2736 - DNA, 60 bp, Homo Sapien
gtggcgcagaagggttgggggcctgtatgccttgcttctaccatgagcagagacaattaa

SEQ ID NO: 2737 - DNA, 60 bp, Homo Sapien
gcaactgaagcggagactctaaacccagcttgcaggtaagagctttcacctttggtaaaa

SEQ ID NO: 2738 - DNA, 60 bp, Homo Sapien
ctgctgcattgtgggtgatgacgtaggacatgtgcttggtacaaaaagggcctgagacat

SEQ ID NO: 2739 - DNA, 60 bp, Homo Sapien
ggagcccgtgggtgcacctgttactgttgggctttccactgagatctactggataaagaa

SEQ ID NO: 2740 - DNA, 60 bp, Homo Sapien
tgtagcctactgataactgcaaaggggagcttggaattatgttagtcagtccctgtgaat

SEQ ID NO: 2741 - DNA, 60 bp, Homo Sapien
ttggatctctgggcttttcaagattctgctaagatctgtattaatcatcttgtgcatggg

SEQ ID NO: 2742 - DNA, 60 bp, Homo Sapien
ggacatatctgtgaaccctccacggtggaaaaaatgccgcccttagtcgggtggggaaaa

SEQ ID NO: 2743 - DNA, 60 bp, Homo Sapien
caaataactggctggcttaacctatgagaagttctatctgacgatcagcttggaacagcc

SEQ ID NO: 2744 - DNA, 60 bp, Homo Sapien
ctgaagagcaaatgaatcctagtacattgaagagtaccgtactctatctggcacttaatt

SEQ ID NO: 2745 - DNA, 60 bp, Homo Sapien
gtgtagtaatgcgtatcagaggtagcggagaatgaagagcgacaagtgggacgagctgta

SEQ ID NO: 2746 - DNA, 60 bp, Homo Sapien
ggtaacaataccgggagcgcaacatacgtacacttctgtaacgcgcactgcacgtgtata

SEQ ID NO: 2747 - DNA, 60 bp, Homo Sapien
aactatttcttagcccatatattcatgtgtcatcgttcaggaacaagtcagtgacaaact

SEQ ID NO: 2748 - DNA, 60 bp, Homo Sapien
attttaatgccgcacatttgcatactatatgcttgttacagtgatccccacagtaactca

SEQ ID NO: 2749 - DNA, 60 bp, Homo Sapien
cacagacaatactttaattgtaagaggagttccacatcattacatcaacagtgtgaattt

SEQ ID NO: 2750 - DNA, 60 bp, Homo Sapien
cgataacctcctcatagctgacattgaacttggctgcggcaactttggctcagtgcgcca

SEQ ID NO: 2751 - DNA, 60 bp, Homo Sapien
ctgatgctccgtgctgttcgggaattgttttatgtacacttgtcaggcagaaaaggtagt

SEQ ID NO: 2752 - DNA, 60 bp, Homo Sapien
gtctgtatatagtcagcttatctcgtgttcaatcgtctgatctctacagagagaagtgga

SEQ ID NO: 2753 - DNA, 60 bp, Homo Sapien
tacaccctgaacccggacttaatccggaagcaggacgccacctctaccatcatcagcatt

SEQ ID NO: 2754 - DNA, 60 bp, Homo Sapien
cagggacacatttctctgtcttttttgatcagtgtcctatacatcgaaggtgtgcatata

SEQ ID NO: 2755 - DNA, 60 bp, Homo Sapien
tgttactttatctcccccaactgatatgttcatagaatgacagtttgtagatagaagatc

SEQ ID NO: 2756 - DNA, 60 bp, Homo Sapien
aagagaatactcgagcgcggagcgattccattgcatttccttccagtagccaggttttga

SEQ ID NO: 2757 - DNA, 60 bp, Homo Sapien
tgtgtcattgtattctttggttctgctcccccactattgaccaatgtatgagatgggaag

SEQ ID NO: 2758 - DNA, 60 bp, Homo Sapien
tcaagatggctgtattgtttggcaccaatatataaactgcttcacccttcaggatcttct

SEQ ID NO: 2759 - DNA, 60 bp, Homo Sapien
gtgcttctgaggaacaactctaattagtacacttgtgtttgtagatttacactttgtatt

SEQ ID NO: 2760 - DNA, 60 bp, Homo Sapien
cacctgcgcagatagagacaatcttacccgcaggttttcagatctaggatttgaagtgaa

SEQ ID NO: 2761 - DNA, 60 bp, Homo Sapien
ccagacacgtacaaaatccagctatgaatatagagggcttatgattcagattgttatcta

SEQ ID NO: 2762 - DNA, 60 bp, Homo Sapien
ctacacacaaaccagtatcgctcatagatcagcaaaccggggcctactagagtctgaaca

SEQ ID NO: 2763 - DNA, 60 bp, Homo Sapien
taatacgaaagactggatataccctggaaagtcttaagccttgtctcatggaccttcacc

SEQ ID NO: 2764 - DNA, 60 bp, Homo Sapien
aactatacagttgaactaaatatccagcagatacaacaagtagtcagaagttcaaagatg

SEQ ID NO: 2765 - DNA, 60 bp, Homo Sapien
aagcgcaagacgacaggaaacgaagcgagagacgagaagccggtgacgagcaggagaaag

SEQ ID NO: 2766 - DNA, 60 bp, Homo Sapien
ttcgatgatctcccataaacaaatgtaatgggcatattgggactcgtatgtaggaatcaa

SEQ ID NO: 2767 - DNA, 60 bp, Homo Sapien
gccagagtttttaaagccttctggatccatggggggagaagtgatatggtgaagggaagt

SEQ ID NO: 2768 - DNA, 60 bp, Homo Sapien
tagcagtgttatccactacgatgataaggccattgaacggctgctagaccgtaaccagga

SEQ ID NO: 2769 - DNA, 60 bp, Homo Sapien
cggtgtgcttgggagtggcgattgtgatttacacgacaaaatgccgaggtgctcggtgga

SEQ ID NO: 2770 - DNA, 60 bp, Homo Sapien
gctcaattgaccgtcttttccagacctctttaagtcacactcttaacttagctttctctg

SEQ ID NO: 2771 - DNA, 60 bp, Homo Sapien
acttccactacccaaagacaaaatgtgcccactgtgtgcttttgagtgtattttctttta

SEQ ID NO: 2772 - DNA, 60 bp, Homo Sapien
gggcagctggttttcttctgagccattagacccaatcgattctgtgttcccaactcggac

SEQ ID NO: 2773 - DNA, 60 bp, Homo Sapien
ccagtccaacttcagcttatcaggtgcccagatagatgacaacaatcccaggcgcaccgg

SEQ ID NO: 2774 - DNA, 60 bp, Homo Sapien
gttccttcaagatcatgtaccccaatttacttgccattactcaattgataaacatttaac

SEQ ID NO: 2775 - DNA, 60 bp, Homo Sapien
taccacaccaaccagacgatcactgcatagtagcacatgacgagtactgcagtcgactcc

SEQ ID NO: 2776 - DNA, 60 bp, Homo Sapien
accacagtctgaccgggctgcattgtgtatggtgccacctagagatccacgatgactgcc

SEQ ID NO: 2777 - DNA, 60 bp, Homo Sapien
tgctgcagacccaagacctcgtgaagtcggtccaggccacgactgagaacaaggaactga

SEQ ID NO: 2778 - DNA, 60 bp, Homo Sapien
aacttttagcatcaaacggggcatcttctcacacagtgcacttccgcccaagacagccgg

SEQ ID NO: 2779 - DNA, 60 bp, Homo Sapien
tttccaccaagtgtctagagtcatgtgagcctcgtgtcatctccggggtggccacaggct

SEQ ID NO: 2780 - DNA, 60 bp, Homo Sapien
acggacctggctagtgacccaaagaccgaagaaaccaagcgaacagccgaagcagatatg

SEQ ID NO: 2781 - DNA, 60 bp, Homo Sapien
cccccatgtggcagcccatgggtatgacataggccaaggcccaactaacagtcaagaaac

SEQ ID NO: 2782 - DNA, 60 bp, Homo Sapien
gactcaccaagggggatgcagtgcgagatgtggacatcatcgaccaccatgacaacacct

SEQ ID NO: 2783 - DNA, 60 bp, Homo Sapien
aagagaaacttgtaatggtctctgaaaaggaattgagaagtaattcctctgattctgttt

SEQ ID NO: 2784 - DNA, 60 bp, Homo Sapien
ggcccttgatggatctaaaactcggaacattactcctcaatgccgtttccccagttgctc

SEQ ID NO: 2785 - DNA, 60 bp, Homo Sapien
aaggcatcgactacgagacggtgcccatcaatctcataaaggatgggggccaacagtttt

SEQ ID NO: 2786 - DNA, 60 bp, Homo Sapien
cctagaagaatataatggagaaagattttgttatggatgtcagggggaattgaaagacca

SEQ ID NO: 2787 - DNA, 60 bp, Homo Sapien
tacttttaccctcgcgcgctgattatccaccctgggcgagggataccgatgtgtcccagt

SEQ ID NO: 2788 - DNA, 60 bp, Homo Sapien
gtctgcaagtggggtcccagtgtagcaccaatgagagtgagaagcctagcattttggttg

SEQ ID NO: 2789 - DNA, 60 bp, Homo Sapien
ttgaaagggatactagcctgcagtgggcatctgtcaccgtgtgtgtgcccaagtgggagg

SEQ ID NO: 2790 - DNA, 60 bp, Homo Sapien
aactacaaattcctgacccaaggacactgtgttataagaggcgtgggctcccctggtggc

SEQ ID NO: 2791 - DNA, 60 bp, Homo Sapien
ccggaatgtgcctgttcggctcctgctctatcccaaaagcacccacgcattatcagaggt

SEQ ID NO: 2792 - DNA, 60 bp, Homo Sapien
tctcaagtctaacaacatcttcctacatgaggggctcacggtgaagatcggtgactttgg

SEQ ID NO: 2793 - DNA, 60 bp, Homo Sapien
ggtgggccagacgggttggacatcgttaataatcatagttggcttctaaatactggtagc

SEQ ID NO: 2794 - DNA, 60 bp, Homo Sapien
gaggattagcttggagttctctatactcaggtacctctttcagggttttctaaccctgac

SEQ ID NO: 2795 - DNA, 60 bp, Homo Sapien
cagtcctgaacaccttactggggcttagtactccggatgaccgtgcgaggtcactgttac

SEQ ID NO: 2796 - DNA, 60 bp, Homo Sapien
ctcccttcccataagctatagacccgaggaaactcagagtcggaacggagaaaggtggac

SEQ ID NO: 2797 - DNA, 60 bp, Homo Sapien
cgccggagtccactcccagtgcttgcaagattccaagttctcacctcttaaagaaaaccc

SEQ ID NO: 2798 - DNA, 60 bp, Homo Sapien
ttcattaggtccatctgatagtcatgtagggtaggcggaactgataggatttctgtttta

SEQ ID NO: 2799 - DNA, 60 bp, Homo Sapien
tgcaaaacgggtgtattatccaggtactcgtacactatttttttgtactgctggtcctgt

SEQ ID NO: 2800 - DNA, 60 bp, Homo Sapien
agcacgcacaaggaacgcaccagatcaaccgacagcagaacgcacgagagccaagaccat

SEQ ID NO: 2801 - DNA, 60 bp, Homo Sapien
tagagaatcccactttctatagcagattgtgtaacaattttaatgctatttccccagggg

SEQ ID NO: 2802 - DNA, 60 bp, Homo Sapien
cctcacagttttcatccagccacgggccagcatgtctgggggcaaatacgtagactcgga

SEQ ID NO: 2803 - DNA, 60 bp, Homo Sapien
tatgcgaaaaggtttttaggaagtatggcaaaaatgttgtattggctatgatggtgacat

SEQ ID NO: 2804 - DNA, 60 bp, Homo Sapien
cactcaaagccatctgatgctcacatttcatgtagtcagaggaggccatctggtttgaat

SEQ ID NO: 2805 - DNA, 60 bp, Homo Sapien
tacattcctgcaatgcatatcattcagacataaagatgggccgaagtacagatacatgct

SEQ ID NO: 2806 - DNA, 60 bp, Homo Sapien
ctgctacaacttgtcggcgaccaacgactccacaatcctagataaggtgatcttgcccca

SEQ ID NO: 2807 - DNA, 60 bp, Homo Sapien
ctgcccccatattcaacaatctaaccatactgagctgctgattccccagggattgcatat

SEQ ID NO: 2808 - DNA, 60 bp, Homo Sapien
ggaaacgacactaggtcgcacagggcatagacgatagtaccattcctggttgaaacacga

SEQ ID NO: 2809 - DNA, 60 bp, Homo Sapien
ttggtcagagtaataactgaaggagttgcttatcttggctttcgagtctgagtttaaaac

SEQ ID NO: 2810 - DNA, 60 bp, Homo Sapien
aggacaccttccgagggagtgtcttagagggagtcctaccaggtacttctgtgatgcaga

SEQ ID NO: 2811 - DNA, 60 bp, Homo Sapien
gggaaggcgcacttggtgctatgagccctccaagtattaaccttacacagagcccccgct

SEQ ID NO: 2812 - DNA, 60 bp, Homo Sapien
tagacaaggacataacaccacgaaacgtgaagttcaaattcaccttgaatactgagaaca

SEQ ID NO: 2813 - DNA, 60 bp, Homo Sapien
ggagcttgttatcgcaaatgctgcactacgaccctaacaagcggatttcggccaaggcag

SEQ ID NO: 2814 - DNA, 60 bp, Homo Sapien
aagctatgtattaggtccaccatacgatctgtgtaagtaagattatcccacttgcccttt

SEQ ID NO: 2815 - DNA, 60 bp, Homo Sapien
tcaaagccacactctgggctccagagtggggatgacatgcactcagctcttggctccact

SEQ ID NO: 2816 - DNA, 60 bp, Homo Sapien
ttgtgccaatgtatcaatgtagagttgctctgttttcttcaactgtatttattgctgcat

SEQ ID NO: 2817 - DNA, 60 bp, Homo Sapien
agagtcctggcactggctaggggtgtcaatgcatcagccgtagtgaacgtcactgtgagg

SEQ ID NO: 2818 - DNA, 60 bp, Homo Sapien
cagtttatttgttgagagtgtgaccaaaagttacatgtttgcacctttctagttgaaaat

SEQ ID NO: 2819 - DNA, 60 bp, Homo Sapien
gaacctcaagtgtgtgttattgagcttggtggaaccgtgggggacatagaaagcatgccc

SEQ ID NO: 2820 - DNA, 60 bp, Homo Sapien
aaagatgcttaacaaaggttaccataagccacaaattcataaccacttatccttccagtt

SEQ ID NO: 2821 - DNA, 60 bp, Homo Sapien
cttgaacctcaacacgacagccaacgtgcataagcatgcaacactaccgaggtagccaca

SEQ ID NO: 2822 - DNA, 60 bp, Homo Sapien
tgactgccaagccatgggtagcctgggtgtaaaacctggagatggtggatgatccccacg

SEQ ID NO: 2823 - DNA, 60 bp, Homo Sapien
gacagagcgcagtagtgattagtcgtatttcgcgacacctcacacggtagatgtgatcaa

SEQ ID NO: 2824 - DNA, 60 bp, Homo Sapien
ggactttgccacaaccttaaagaacaaattccgctccaagcattatttcagcaaacaccc

SEQ ID NO: 2825 - DNA, 60 bp, Homo Sapien
ctgtaaccagaagccagttttatctaacggctactgaaacacccactgtgttttgctcac

SEQ ID NO: 2826 - DNA, 60 bp, Homo Sapien
tgttgagtcagtccaaggggttttacttaggacaagttgtaccttgccctctctccagct

SEQ ID NO: 2827 - DNA, 60 bp, Homo Sapien
gtttggcttataaacacattgaatgcgctttattgcccatgggatatgtggtgtatatcc

SEQ ID NO: 2828 - DNA, 60 bp, Homo Sapien
acatgctttagattatatattccgcacttaaggattaaccaggtcgtccaagcaaaaaca

SEQ ID NO: 2829 - DNA, 60 bp, Homo Sapien
ctgctgttgaacagatcagcctagagagtgtcgacatggacagccccgtcaacatgaagt

SEQ ID NO: 2830 - DNA, 60 bp, Homo Sapien
gcatttcgctacccgagtttagtaacagtgcagattccacgttcttgttccgatactctg

SEQ ID NO: 2831 - DNA, 60 bp, Homo Sapien
gtcgaagtctacccaatatcccccagtaagagaataaggggcaagaatgactcatgaact

SEQ ID NO: 2832 - DNA, 60 bp, Homo Sapien
ctggggagcacttaattcttcccatttcaaaaggtaatgttgcctggggcttaacccacc

SEQ ID NO: 2833 - DNA, 60 bp, Homo Sapien
gtaacctcttcaactggacgctctcctaccgggcggactcggacgtctttgtgccttatg

SEQ ID NO: 2834 - DNA, 60 bp, Homo Sapien
ccccccacacaaaagcccctttggtgtgaaaaacggcccccacaagtttataaaaggggg

SEQ ID NO: 2835 - DNA, 60 bp, Homo Sapien
caagaagcgcctgattgtcagtaaacgggcaggtactcagtgcaccaactgccagacgac

SEQ ID NO: 2836 - DNA, 60 bp, Homo Sapien
cttgaaaactcttctggcgtaaaaacattctcgagttaataatgttaccccttataacag

SEQ ID NO: 2837 - DNA, 60 bp, Homo Sapien
agtatgttcaaagtcaaataactcctcattgtaaacaaactgtgtaactgcccaaagcag

SEQ ID NO: 2838 - DNA, 60 bp, Homo Sapien
ttaagttattgacgcccagcgcgcctcgcctcttcacccatcaacgctgtgctttgccca

SEQ ID NO: 2839 - DNA, 60 bp, Homo Sapien
aatctgcagccgctccatggcctcgatcatggcccgcatggacacgaagatgttctggta

SEQ ID NO: 2840 - DNA, 60 bp, Homo Sapien
tttgacttagaaagtgcccttcaaaaggaccctgttcactgctgcacttttcaatgaatt

SEQ ID NO: 2841 - DNA, 60 bp, Homo Sapien
tcagtgtttaaataaagacctatgtacttaatcctttaactctgcggatagcatttggta

SEQ ID NO: 2842 - DNA, 60 bp, Homo Sapien
gaaccctcgtaagaaatagtcaaacacattaagtcctttccagctgtccctagaaagctg

SEQ ID NO: 2843 - DNA, 60 bp, Homo Sapien
ctcccttggcgatctgcaggaacactagtaatgactggaattactccgtgatctttgatg

SEQ ID NO: 2844 - DNA, 60 bp, Homo Sapien
catcctgtaacattggcttacctgtatattatatgccacccgtaaccataaaaacaccag

SEQ ID NO: 2845 - DNA, 60 bp, Homo Sapien
tttgagaggtgattgatactgctaacaattttctagtactctagtttgtttcaagaagag

SEQ ID NO: 2846 - DNA, 60 bp, Homo Sapien
tcggatgctcttggctttaaggatcaatgtcttagccaaaggatacagtggcatttccct

SEQ ID NO: 2847 - DNA, 60 bp, Homo Sapien
ttgactcttgcaatccacaatctgacattctcaggaagcccccaagttgatatttctatt

SEQ ID NO: 2848 - DNA, 60 bp, Homo Sapien
caaggctatatttctgggatgaatataatctgaggaagggagttaaagaccctcctgggg

SEQ ID NO: 2849 - DNA, 60 bp, Homo Sapien
gttaactattgtataatgtggcctgttatacatgacactcttctgaattgactgtatttc

SEQ ID NO: 2850 - DNA, 60 bp, Homo Sapien
acccctcttcaatctgaagattagtatggtttggtgttctaacagtatcccctagaagtt

SEQ ID NO: 2851 - DNA, 60 bp, Homo Sapien
ttgtagctttttgatgggctactcatacagttagattttacagcttctgatgttgaatgt

SEQ ID NO: 2852 - DNA, 60 bp, Homo Sapien
cggcctttatgttttttgtaagataaaccgtttttaacacatagcgccgtgctgtaaata

SEQ ID NO: 2853 - DNA, 60 bp, Homo Sapien
tttaagacactgttacagagatactgttgtcaccttctggggcacggtctttggggagag

SEQ ID NO: 2854 - DNA, 60 bp, Homo Sapien
gcactcggttatcttttaaaattcacacagaaaaattccgtttggtagactccttccaat

SEQ ID NO: 2855 - DNA, 60 bp, Homo Sapien
cgactacatcttggacctgcagatcgccctggactcgcatcccactattgtcagcctgca

SEQ ID NO: 2856 - DNA, 60 bp, Homo Sapien
acaggaagagagaagaagcgacagccacggaaacaagcaacgccacagagacacgagggc

SEQ ID NO: 2857 - DNA, 60 bp, Homo Sapien
cggcctgtgtgaacctgtcgtgcaaagctcacgtcaccaactgctgcagttatctcctga

SEQ ID NO: 2858 - DNA, 60 bp, Homo Sapien
tccaagtgccacgtgaactatgcaatttaaagggttgacccacactagacgaaactggac

SEQ ID NO: 2859 - DNA, 60 bp, Homo Sapien
cccctcttattcctctaggcaagcaggacctggcatcatggtggatatggtgcagagaag

SEQ ID NO: 2860 - DNA, 60 bp, Homo Sapien
tctttaggccttgtctgtaaaacgaatggctcaggctaagtgatctctaaatgcctaaat

SEQ ID NO: 2861 - DNA, 60 bp, Homo Sapien
ataattattattagtgtgggtatggctaatgagttctgattcacccacgaaggttacatt

SEQ ID NO: 2862 - DNA, 60 bp, Homo Sapien
cttgtacttcattgtgctggtccgcgtgaagaacaagaccgactacacgggccctgagag

SEQ ID NO: 2863 - DNA, 60 bp, Homo Sapien
aagccgggtagcgcgcgcgagtcgacaagtaagagtgcgggaggcatcttaattaaccct

SEQ ID NO: 2864 - DNA, 60 bp, Homo Sapien
aaaatggaacagcccttctaccacgacgactcatacacagctacgggatacggccgggcc

SEQ ID NO: 2865 - DNA, 60 bp, Homo Sapien
gtaaagtggagccagtgatagtagttaccttgcagggtcgttgtcaggttatgtgagaaa

SEQ ID NO: 2866 - DNA, 60 bp, Homo Sapien
gaaaaacctgttcccatcaccggcctagcctagaatcctagcctagaagccctctctccc

SEQ ID NO: 2867 - DNA, 60 bp, Homo Sapien
atcacaaccataacccacccacacaaacgatagagactcaataaaacatgtccagctgtc

SEQ ID NO: 2868 - DNA, 60 bp, Homo Sapien
cagcgcaatggtaggtaggttaacataagatgcctccgtgagaggctggtggtcagccct

SEQ ID NO: 2869 - DNA, 60 bp, Homo Sapien
aacattttgcccgtgaatatgattgctatggtgatagttatttcattgatacagacttga

SEQ ID NO: 2870 - DNA, 60 bp, Homo Sapien
ggtagatgtaggcagcatgagtggttaagagtcaagggagtagccggggtagtggcttac

SEQ ID NO: 2871 - DNA, 60 bp, Homo Sapien
gaagccgtcctgtactgtgccagcaatcacagctttcttgcgactataacatcttttgtg

SEQ ID NO: 2872 - DNA, 60 bp, Homo Sapien
taagcgaggttccccgtgtgtaggtagatctggtctttagaggcagatagataggtcagt

SEQ ID NO: 2873 - DNA, 60 bp, Homo Sapien
gaaggcttaaatgagtttagatgggaaatagcgttgttatcgccttgggtttaaattatt

SEQ ID NO: 2874 - DNA, 60 bp, Homo Sapien
ccaagctgtgataagtggaatggttactgtttatactgtggtatgtttttgattacagca

SEQ ID NO: 2875 - DNA, 60 bp, Homo Sapien
cttgcccttcactcatcgcagttctccccacggctactccaggtcctcttgaaatccgtc

SEQ ID NO: 2876 - DNA, 60 bp, Homo Sapien
ttctctagttcgtcccaaagtcgtccgcagtgtccactactgtcctgctactaagaagac

SEQ ID NO: 2877 - DNA, 60 bp, Homo Sapien
ggtacggcaaccacatgtcccagatcgtctccaattcgaaaacaaccgtcctgctgtccc

SEQ ID NO: 2878 - DNA, 60 bp, Homo Sapien
gacctactttggtagtggaatagtgaatacttactataatttgacttgaatatgtagctc

SEQ ID NO: 2879 - DNA, 60 bp, Homo Sapien
tctgattagtcaaattattaagtgccatggattactttatgcagcagtcaggtacatagt

SEQ ID NO: 2880 - DNA, 60 bp, Homo Sapien
ttagagctgcttaaaacaggaagtgatgtataaggtggtggttgttgcatggggacaatg

SEQ ID NO: 2881 - DNA, 60 bp, Homo Sapien
agtaggatggatgtttgagcgacacacacgtgtaacactgcatcggatgcggggcgtgga

SEQ ID NO: 2882 - DNA, 60 bp, Homo Sapien
caaccaccctagttcctccggtagcttttcagatgctgaccttgcggatggcgtttcagg

SEQ ID NO: 2883 - DNA, 60 bp, Homo Sapien
cccccgcgaaaacccgcccagcttttattgcccccgttccaaatttctccctatgagtta

SEQ ID NO: 2884 - DNA, 60 bp, Homo Sapien
acttgtactatattggctgccatgatagggttctcacagcgtcatccatgatcgtaaggg

SEQ ID NO: 2885 - DNA, 60 bp, Homo Sapien
aagcgcgagatccagggtctcttcgacgagctgcgagccaaggaaaaggaactactgagc

SEQ ID NO: 2886 - DNA, 60 bp, Homo Sapien
accccaaaagcgtgtgacagtaagctaacctttgatgctataactacgattcggggagaa

SEQ ID NO: 2887 - DNA, 60 bp, Homo Sapien
gagaaggggaagcactcgtgtgcaacagacaagtgactgtatctgtgtagactatttgct

SEQ ID NO: 2888 - DNA, 60 bp, Homo Sapien
cgtttttaactgcaactttctataatgccaaaatgacacatctgtgcaatagaatgatgt

SEQ ID NO: 2889 - DNA, 60 bp, Homo Sapien
ccgaaattggggcagtagacgccatcttcacacgaattcatagctgcgaatccatctccc

SEQ ID NO: 2890 - DNA, 60 bp, Homo Sapien
gaagatcctaccccaattccttgtaggagtataggccggtctaaagtgagctctatgggc

SEQ ID NO: 2891 - DNA, 60 bp, Homo Sapien
cacctcgcatgagatgaatgtgcgtccagaacagccgcagttctcacccatgccagggaa

SEQ ID NO: 2892 - DNA, 60 bp, Homo Sapien
gttttacatgccccgtttttgagactgatctcgatgcaggtggatctccttgagatcctg

SEQ ID NO: 2893 - DNA, 60 bp, Homo Sapien
tgtgtgtgcgtcctgtcggagccctgtctcctctctctgtaataaactcatttctagcag

SEQ ID NO: 2894 - DNA, 60 bp, Homo Sapien
cagcctcaccctgtcaggtatcaaagaagacaacagcttgctcaaccagggcttcttgca

SEQ ID NO: 2895 - DNA, 60 bp, Homo Sapien
cctacacatctcatgacacgcgcccaccctatgcgcgttttcacaaactccgaagaacgc

SEQ ID NO: 2896 - DNA, 60 bp, Homo Sapien
ccagtctacttgagttagcataatacagaagtcccctctactttaacttttacaaaaaag

SEQ ID NO: 2897 - DNA, 60 bp, Homo Sapien
cttcattccattgacttagaggcaaccaggattgaccattcttttatagagctatttgcc

SEQ ID NO: 2898 - DNA, 60 bp, Homo Sapien
acggcggtagagggagataactgtgtgttcgatggggtcatctaccgcagtggagagaaa

SEQ ID NO: 2899 - DNA, 60 bp, Homo Sapien
tcactctgtaaaatctgtgtacaccagtattttgcattcagtattgtcaaggccatgact

SEQ ID NO: 2900 - DNA, 60 bp, Homo Sapien
ggaatatcacttccatacacatagagaactggcgcagtcttcacacgctcaacgccgtgg

SEQ ID NO: 2901 - DNA, 60 bp, Homo Sapien
atgtgttctcggtcgccgtagacagcgctctggctaccaccgtgaggctacttgaactgt

SEQ ID NO: 2902 - DNA, 60 bp, Homo Sapien
ccattgactaccttctcatgctctgaggtactactgcctctgcagcacaaatttctattt

SEQ ID NO: 2903 - DNA, 60 bp, Homo Sapien
tggcaggatgctactaccccttcatcagtgacctcccctacagaaggccctggcagtgtt

SEQ ID NO: 2904 - DNA, 60 bp, Homo Sapien
accgacgaatgacactgacagccgacgaatacccacaacacgctaaacggtagccacagc

SEQ ID NO: 2905 - DNA, 60 bp, Homo Sapien
tactatcattgtggctttggttcaaaaggaaacactacatttgctcacagatgattcttc

SEQ ID NO: 2906 - DNA, 60 bp, Homo Sapien
tattgtttccctcgtccgtctgtctcgatgcctgattcggacggccaatggtgcttcccc

SEQ ID NO: 2907 - DNA, 60 bp, Homo Sapien
ggggctttttctttatcaccctcagtcttaatccatccaccagagtctagaaggccagac

SEQ ID NO: 2908 - DNA, 60 bp, Homo Sapien
gagtcctccaatcaggacgcactttccggctccagtgacctgctcgaacttctgctgcaa

SEQ ID NO: 2909 - DNA, 60 bp, Homo Sapien
tttcggaggtaaaagaaagtagctcatgccaacaagtaacattcaccagcatttattgag

SEQ ID NO: 2910 - DNA, 60 bp, Homo Sapien
catcatgagttctgctgaatgccgcgatgggtcaggtaggggggaaacaggttgggatgg

SEQ ID NO: 2911 - DNA, 60 bp, Homo Sapien
gtaacagctgaggtctcttgagggagcttagccaatgtgggagcagcggtttggggagca

SEQ ID NO: 2912 - DNA, 60 bp, Homo Sapien
tgactgccagactgtggggaggcactctcctctggacctaaacctgaaatccccctctct

SEQ ID NO: 2913 - DNA, 60 bp, Homo Sapien
gaattcccggtccgacagaaagaggtctatatcagagagtagtcgatcaggcaaaagatc

SEQ ID NO: 2914 - DNA, 60 bp, Homo Sapien
ccaaagtttggaagtgatcgggaaaggaacccattgcaaccaagtcgaagtgatagccac

SEQ ID NO: 2915 - DNA, 60 bp, Homo Sapien
agtacctcccaattcaagcagagaaactgacctgactaaagttaatcgcagatgaactag

SEQ ID NO: 2916 - DNA, 60 bp, Homo Sapien
tgaaacagatcgaacacaccctgaatgaaaagcgcatcctgcaagctgtcaactttccgt

SEQ ID NO: 2917 - DNA, 60 bp, Homo Sapien
acgcccacgtcagggtgaccatctgtggtaaccgagaattccttggaggcagcgtcttca

SEQ ID NO: 2918 - DNA, 60 bp, Homo Sapien
catgtgatctattactctgacataaacccatctgtaatatattgccagtatataagctgt

SEQ ID NO: 2919 - DNA, 60 bp, Homo Sapien
atcttggcagaactttctatatcgcctatagactgatttgcttagatctcttataatttg

SEQ ID NO: 2920 - DNA, 60 bp, Homo Sapien
acacgcagagagacgtaagcaaaacctaagacgcaaagagcgaagcgactaagaagaagg

SEQ ID NO: 2921 - DNA, 60 bp, Homo Sapien
gcagttaccatacgagaaatcaaggtcgttgggacggaagtaaccttatctgcttttccc

SEQ ID NO: 2922 - DNA, 60 bp, Homo Sapien
cttgttttccaggcatcgaataactgttgagattgttctactgttgtcgtatattcttct

SEQ ID NO: 2923 - DNA, 60 bp, Homo Sapien
taaactcaccttgcttacttcccccttctaaacaacaatcccaacccttacgccatggtg

SEQ ID NO: 2924 - DNA, 60 bp, Homo Sapien
gtctccccgctggacaatggagacctgattcgggagatctggcattaccagtacctgagc

SEQ ID NO: 2925 - DNA, 60 bp, Homo Sapien
aatctctaagccacaggaattaagttcagatctaaatgtcggtgatacttcccagaattc

SEQ ID NO: 2926 - DNA, 60 bp, Homo Sapien
gctaaaaaacgcaaagatgccatggggaatacccggcaggagatgactcacatggtgaat

SEQ ID NO: 2927 - DNA, 60 bp, Homo Sapien
agggttccagactggttggacttgttcgtctggacgacactggagtggaacactgcctcc

SEQ ID NO: 2928 - DNA, 60 bp, Homo Sapien
tcttcctctcccaacataacaatcgtggtaacagaatgcgactgctgatttaccgatgta

SEQ ID NO: 2929 - DNA, 60 bp, Homo Sapien
ttactagatcaggttttagggtcctgcaaaaggctagctcggcactacactagggaattt

SEQ ID NO: 2930 - DNA, 60 bp, Homo Sapien
gatagtggagtcccagcactaccttctttgactatgcgtcgtatgcgagagtctgtttcc

SEQ ID NO: 2931 - DNA, 60 bp, Homo Sapien
atattgaaggtgaacatgtggcgtatgctgctatgtgaagcagtagctgctgtcatggcc

SEQ ID NO: 2932 - DNA, 60 bp, Homo Sapien
cccagttggaatactgatagctctaaaaacttagtaaaacctttgttaggattaacagga

SEQ ID NO: 2933 - DNA, 60 bp, Homo Sapien
aaacggagcggagttctggatcatgtcccatccagtccagtgaatccacgacccgcagac

SEQ ID NO: 2934 - DNA, 60 bp, Homo Sapien
gcaaaatgagcaattgagtgactcctttccatatgaattttttcaagtataacttgcaag

SEQ ID NO: 2935 - DNA, 60 bp, Homo Sapien
aaggaagcccaccttactccatactcacttcaagctataaaggcatctagacacagcaca

SEQ ID NO: 2936 - DNA, 60 bp, Homo Sapien
gacctgtcctagtaacaaaactcgcaaaaattgtcaccacagtggaagccaggtgccttt

SEQ ID NO: 2937 - DNA, 60 bp, Homo Sapien
tgtgggttgagacactatagagtgtgtcataaccgagaccggataggggagtagttactt

SEQ ID NO: 2938 - DNA, 60 bp, Homo Sapien
atgcattagttgtctgtcaaggaaggtgagtggtgaagggtttttacatatatacaagaa

SEQ ID NO: 2939 - DNA, 60 bp, Homo Sapien
ctgtttagcagaactcattctatccccaatcagctccttttccgttctgttctgctggga

SEQ ID NO: 2940 - DNA, 60 bp, Homo Sapien
gccacctggaccccgactgagtttcgggaatgtgactacaacaaattcatgagtgttctg

SEQ ID NO: 2941 - DNA, 60 bp, Homo Sapien
tcgcatacaatcatgtctcacagcgctgatcttagcacattatgtcatgtttccatctca

SEQ ID NO: 2942 - DNA, 60 bp, Homo Sapien
aaaatgtgctttacacagttgcctataaaaagtgctctatgttatccaagcaattcatac

SEQ ID NO: 2943 - DNA, 60 bp, Homo Sapien
aagtctgagcccttccgcatttctccggtcaaccgcatgtatgccatctgccgcagctac

SEQ ID NO: 2944 - DNA, 60 bp, Homo Sapien
tgctgatctcgtggacatgcttccgctccagctgttagcgacttgagctcgtcttcacag

SEQ ID NO: 2945 - DNA, 60 bp, Homo Sapien
accagttctctgcatcacgtgagtctgagtttcgttgtgggtatcaccactctctggcca

SEQ ID NO: 2946 - DNA, 60 bp, Homo Sapien
cacaaatcaacggttgttatatgtagtttaaaacctaaccagtgtgcggggaatttttct

SEQ ID NO: 2947 - DNA, 60 bp, Homo Sapien
acttcagattctacattaccactcaaacgcgaaacacaatcaaaatacccgagagaccgc

SEQ ID NO: 2948 - DNA, 60 bp, Homo Sapien
acaggtgtctaacgggcaatcgcctagaaacgatagagacagaacgcatgcgcgcaggcg

SEQ ID NO: 2949 - DNA, 60 bp, Homo Sapien
gtgaggctatttcgtgtgagccgctggagagtcctgtccacggaagcatggattgctctc

SEQ ID NO: 2950 - DNA, 60 bp, Homo Sapien
caaggaagatggagctcccccatcccacacgcactgcactgccattgtcttttggttgcc

SEQ ID NO: 2951 - DNA, 60 bp, Homo Sapien
tcctcctgtcccgtggtttcatcatatctctttgcataccccatgtcttccccagttgtc

SEQ ID NO: 2952 - DNA, 60 bp, Homo Sapien
tggaccggtggctagcaatatcgtgtgttgcgcactcgtaaagtgtgttatttcaaccct

SEQ ID NO: 2953 - DNA, 60 bp, Homo Sapien
gtcggtagaccaggggttacgtgactggggaaaatctcacatctccttgtctgaaaacat

SEQ ID NO: 2954 - DNA, 60 bp, Homo Sapien
gaagacttccccttgacgttgctgtggtctgtaaccgtgtccatgtttccatttggaggg

SEQ ID NO: 2955 - DNA, 60 bp, Homo Sapien
tgcttgggaagaatggggatcacaatggcctatgagatagtctgcctggtcaatgctgag

SEQ ID NO: 2956 - DNA, 60 bp, Homo Sapien
tcatcatcgtgcctctctcaacgctgtccaactgggcgtacgagtttgacaagtgggccc

SEQ ID NO: 2957 - DNA, 60 bp, Homo Sapien
ggaggaccagtcagaccagcgcgtcatcatcaagctgaacatccatgtgggaaacatttc

SEQ ID NO: 2958 - DNA, 60 bp, Homo Sapien
ctcctagaattgaatcaaagagtatgtctgctcccgtgatctttgatagatccagggaag

SEQ ID NO: 2959 - DNA, 60 bp, Homo Sapien
tttgaatgagcagacgtacacccgagtagaagggtttgtgcaggacatgcgtctcatctt

SEQ ID NO: 2960 - DNA, 60 bp, Homo Sapien
caagtactaggcgtggatatctggataatgaaggagtgtgaattaagaaggagtaccagg

SEQ ID NO: 2961 - DNA, 60 bp, Homo Sapien
ttgggaagttcccaactttcccgttagggtaaaatccgaaattttcccctttttaaaccc

SEQ ID NO: 2962 - DNA, 60 bp, Homo Sapien
aggaggaaggaatgccaatgacctagagacacgagaagtccatgtggaggcacacagcag

SEQ ID NO: 2963 - DNA, 60 bp, Homo Sapien
cgcttttcataatgtgcaaagtcatcaaagattgaggtggtatgcttgaaagtagcaatt

SEQ ID NO: 2964 - DNA, 60 bp, Homo Sapien
tgcaggcctttgccgaccagctcatcgctgccggccattatgccaagggagacatttcta

SEQ ID NO: 2965 - DNA, 60 bp, Homo Sapien
caggactatgagcatgtcacgatgttacaagaacgattccgggagtttgcccgagacacc

SEQ ID NO: 2966 - DNA, 60 bp, Homo Sapien
cacatttaaactacctgttaatataagggatttgtagtatcagcttgttgagcaatgact

SEQ ID NO: 2967 - DNA, 60 bp, Homo Sapien
cccaacccagcaatccgggttctctttcttcgtgagacacgttatgagggaagccctgat

SEQ ID NO: 2968 - DNA, 60 bp, Homo Sapien
gcccagcactttccgtcaacgttgtactgtatgtgatgaattgcgttggtctctgcattt

SEQ ID NO: 2969 - DNA, 60 bp, Homo Sapien
tggcctcgatctactccccggatcactcaagcaataacttctcgtccagcccttctaccc

SEQ ID NO: 2970 - DNA, 60 bp, Homo Sapien
tctatttaattgaaactctctgttcagaaagcaataactttgtctcgttcctgttgggct

SEQ ID NO: 2971 - DNA, 60 bp, Homo Sapien
agaggaccgccagcgcgcatagagagatcggtgcgcggacagatttgtctcgaacatagt

SEQ ID NO: 2972 - DNA, 60 bp, Homo Sapien
gcttgaagatcgttagtatctaacatgtatcccaactcctataattccctatcttttagt

SEQ ID NO: 2973 - DNA, 60 bp, Homo Sapien
agaggtctgtgaattgtaggttaagaacccctgccctagctaatcagatccaccaatgtt

SEQ ID NO: 2974 - DNA, 60 bp, Homo Sapien
ccacaggtcacgctcaggacccgcatctcattccgatcctccttgtgtgggtggtactta

SEQ ID NO: 2975 - DNA, 60 bp, Homo Sapien
agttcccatcctttgattgatcactctccctgacatccacctgtatgactttgtcaccaa

SEQ ID NO: 2976 - DNA, 60 bp, Homo Sapien
taatctttcaccgccccagcgcagacctgggaagcggaaaatcccgccgtattttcccag

SEQ ID NO: 2977 - DNA, 60 bp, Homo Sapien
acttacataaaagcctacttgagaagagctcagtgttacatggacacagaacagtatgaa

SEQ ID NO: 2978 - DNA, 60 bp, Homo Sapien
aatcactggcagattccggagttagcccgaaaagttaatacagagcagaaacataccact

SEQ ID NO: 2979 - DNA, 60 bp, Homo Sapien
tatgatccaggccgatctacagtcattcaccgggggtaggagagtcacacaagtacaacc

SEQ ID NO: 2980 - DNA, 60 bp, Homo Sapien
ttctcaaaatgggacttgtgacggtgtacctgaggcccccatctccttaaagagtgtggc

SEQ ID NO: 2981 - DNA, 60 bp, Homo Sapien
cagtctatggtgccaataaattcactggatcagagcatgccactctagtcaacaacctga

SEQ ID NO: 2982 - DNA, 60 bp, Homo Sapien
gccctactcccacgtatccaacctagtctaccctagaatccactaacgctttattatgtt

SEQ ID NO: 2983 - DNA, 60 bp, Homo Sapien
tgtctgctagctagttggtttctatacaaatacatattcgaatgtcttgctggatgaaga

SEQ ID NO: 2984 - DNA, 60 bp, Homo Sapien
agttgctgagtgggttgatctctggtctttccttgacagtgcacgttcgaaggctgtggg

SEQ ID NO: 2985 - DNA, 60 bp, Homo Sapien
gcatataccttggagggaccatgctatgagggaaagtgtaaatctagaaatgagaaaccc

SEQ ID NO: 2986 - DNA, 60 bp, Homo Sapien
tttaacttttatggtttggtcgtaggatcagcagggctcgcacttcggtcagcaggaaaa

SEQ ID NO: 2987 - DNA, 60 bp, Homo Sapien
ttggcaccagggacttcctgacaccacagtcaattaattcctcaggggcctgtggctgga

SEQ ID NO: 2988 - DNA, 60 bp, Homo Sapien
atgctcttgatacagagttgcttacaatgacggatatgatgagtgaagacgaggggaaaa

SEQ ID NO: 2989 - DNA, 60 bp, Homo Sapien
agggaactgaacattccagagcgtgtagtgaatcacgtaaagctagaaatgatccccagc

SEQ ID NO: 2990 - DNA, 60 bp, Homo Sapien
gtcaacaaggagatctgctctcgtcttgtctgtaaggaacacgaagctatgaaagatgag

SEQ ID NO: 2991 - DNA, 60 bp, Homo Sapien
ttttcctatggagggaaccttgggtaggtttgagcagggggtatagtgtctgctttgcat

SEQ ID NO: 2992 - DNA, 60 bp, Homo Sapien
ggagcatcttaagaaacaggataaaactggtagtatgaacgttatccacatgctggaaag

SEQ ID NO: 2993 - DNA, 60 bp, Homo Sapien
aagggacctggatgacaggcaatcaaggcctgagcaaccaaaaggagtgccccatatggc

SEQ ID NO: 2994 - DNA, 60 bp, Homo Sapien
aaacgagactcagaccgcgacacagccaccgtatttatggaatgacaaaataaataaagc

SEQ ID NO: 2995 - DNA, 60 bp, Homo Sapien
gaagattgtgaggaaattttgtaggaaatttgcatacccgtaaagggagacttttttaaa

SEQ ID NO: 2996 - DNA, 60 bp, Homo Sapien
cacatggtaattctaagacttgttctttacccatggaatgtaatatttttgcaaagatgg

SEQ ID NO: 2997 - DNA, 60 bp, Homo Sapien
agtatcttcaactaatggtgtacgtcactaaaaccagcatcaaaatcccaagttctcata

SEQ ID NO: 2998 - DNA, 60 bp, Homo Sapien
aactgttcctgtggttgctttgaaagaacccttccttacctggtgtgttttctataaatc

SEQ ID NO: 2999 - DNA, 60 bp, Homo Sapien
tcttctatttcacacaagacttctcccgccgtattggttgcggaccttgcgcggccggag

SEQ ID NO: 3000 - DNA, 60 bp, Homo Sapien
ggagtgacgcgataaaacgccgaacggaacacgaactgcgacactgaaagaacccacccg

SEQ ID NO: 3001 - DNA, 60 bp, Homo Sapien
tgaccttattgtccgttgtgagcacgatggcgtcatgactggagccaacggggaagtgtc

SEQ ID NO: 3002 - DNA, 60 bp, Homo Sapien
ggccctaaccctgcgtggcatcaatagcttccgccagtacaagtatgacctggtggcagt

SEQ ID NO: 3003 - DNA, 60 bp, Homo Sapien
tcttcctaagtggtagatctaaataccataaatggtggctagctttataggaaaacccat

SEQ ID NO: 3004 - DNA, 60 bp, Homo Sapien
tttggtttatcaaagtggcgcatgatgtccctctcacagtcacgaagtagcaaatctgca

SEQ ID NO: 3005 - DNA, 60 bp, Homo Sapien
cgctcttgtcgatttcctgtagtgaatcaggcaccggagtgcaggttcgggggtggaatc

SEQ ID NO: 3006 - DNA, 60 bp, Homo Sapien
tatttgggctacattgtaagatccatctacacagtcgttgtccgacttcacttgatacta

SEQ ID NO: 3007 - DNA, 60 bp, Homo Sapien
caacagaagggtaggttagatgctattaagaaggcacttaatagtacatcatgtaagatg

SEQ ID NO: 3008 - DNA, 60 bp, Homo Sapien
aatgaatccatagactcatctagcaccaactaccattagcactatgttaggagctgcaag

SEQ ID NO: 3009 - DNA, 60 bp, Homo Sapien
gctagaacatttactaatgccaggtgttgcatttgacactttacaagtataacctcactg

SEQ ID NO: 3010 - DNA, 60 bp, Homo Sapien
gacgtcgaggcattacaatcgcgaaaccaagccatagcatgaaacagcgagcttgcagcc

SEQ ID NO: 3011 - DNA, 60 bp, Homo Sapien
atgcgtccagggtcataaccccctaaaatccatcatgcaaccttattaatctgtcttggg

SEQ ID NO: 3012 - DNA, 60 bp, Homo Sapien
gtccacatgtgaactttttctaggtggcaggacaaatcgcgcccatttagaggatgtggc

SEQ ID NO: 3013 - DNA, 60 bp, Homo Sapien
agttatttacaattcgtggcactccacaacagatagactatgctcggcaactcatagaag

SEQ ID NO: 3014 - DNA, 60 bp, Homo Sapien
cacttgccagttgttccggacacatagaaagataacgacgggaagagcggggcccgcttt

SEQ ID NO: 3015 - DNA, 60 bp, Homo Sapien
ggtctggaatacctccactcacgaaggattctgcatggggacgtcaaagctgacaacgtg

SEQ ID NO: 3016 - DNA, 60 bp, Homo Sapien
aacccatgcctcccagctgagcactgggaatgtcagcccagtaagtattggccagtcagg

SEQ ID NO: 3017 - DNA, 60 bp, Homo Sapien
agctgtacgactggccctacaggtttctgcggcgctttgggcgggacaaggtaacctttt

SEQ ID NO: 3018 - DNA, 60 bp, Homo Sapien
gttgtccctctgctacgttcctattgtcattaaaggtatcacggtcgccacctggcattc

SEQ ID NO: 3019 - DNA, 60 bp, Homo Sapien
tttatttctcttatcgctccttctaagtacacagacggaagggacaaggagcggaacagg

SEQ ID NO: 3020 - DNA, 60 bp, Homo Sapien
tatattaccggctcctccatcattggtggaggagtgaaggcccccaggatcaagaccaag

SEQ ID NO: 3021 - DNA, 60 bp, Homo Sapien
aagactgatccgtcggacagccagacggggttagcggagcaatgcgcaggaataaggaag

SEQ ID NO: 3022 - DNA, 60 bp, Homo Sapien
gttattaccctgtgtaccttgtccctcattttgctgtgacaccctgaaaaagctgaccac

SEQ ID NO: 3023 - DNA, 60 bp, Homo Sapien
gaaccacactgttgagttggacacactgtaaacccctgggtaactgtcaagtcatgatgg

SEQ ID NO: 3024 - DNA, 60 bp, Homo Sapien
tgatgtgaccctcaatcccacatacgcagggggaaggcttggagtagacaaaaggaaagg

SEQ ID NO: 3025 - DNA, 60 bp, Homo Sapien
caaagcccactttgttcgcagtgtagctgaaatactgtctatctctaataaaaacaggag

SEQ ID NO: 3026 - DNA, 60 bp, Homo Sapien
gaagagcccgtcgcgctggacagcttacctagtcttgtagcattcggccttggtgaacac

SEQ ID NO: 3027 - DNA, 60 bp, Homo Sapien
agatgagcgctagccttccaagcatgaagtcggggaccaaattagcctttaactcataaa

SEQ ID NO: 3028 - DNA, 60 bp, Homo Sapien
gaaatttactgtaactgtcagtgtacacgtctggaccccgtttcatttttacaccaattt

SEQ ID NO: 3029 - DNA, 60 bp, Homo Sapien
tctagttattcagaggagtaagatggtgatgttcacctggcaatcagctgagttgagact

SEQ ID NO: 3030 - DNA, 60 bp, Homo Sapien
tttccttgtgagcaaaagggtcttgataacggatacagcatatccaagttttgcaatcat

SEQ ID NO: 3031 - DNA, 60 bp, Homo Sapien
atgatactgatgcggttgagattgctatcgacaacacggcttttatggacgagttctttt

SEQ ID NO: 3032 - DNA, 60 bp, Homo Sapien
ttgggaaggaggcgggtagagcaccatgatcacgctgttgtgagtggaagattggctgga

SEQ ID NO: 3033 - DNA, 60 bp, Homo Sapien
ccgaggagcctaggggagagctttagtgacaaggtcatgagatggttccaggccatgctg

SEQ ID NO: 3034 - DNA, 60 bp, Homo Sapien
caaactgctgcatactttgacaaggaaaatctatatttgtcttccgatcaacatttatga

SEQ ID NO: 3035 - DNA, 60 bp, Homo Sapien
gtttttggaattgcttccctttccccacaagaacaaagcactggccgggtaaggtggctc

SEQ ID NO: 3036 - DNA, 60 bp, Homo Sapien
gaatggggtggtagacttggaagagggatgggctagttggcaggatttcacgtttctgct

SEQ ID NO: 3037 - DNA, 60 bp, Homo Sapien
gctcgacgaaatcctcaagttcgttgctcggaactacctagagggataactgttccccct

SEQ ID NO: 3038 - DNA, 60 bp, Homo Sapien
aactgatcagaaccatcatgggctggacattggacttcctccgggagcggctgttgggct

SEQ ID NO: 3039 - DNA, 60 bp, Homo Sapien
tgggagctggggtagtacttcttgtccgcgattctcacgcttaagacctggttttctctt

SEQ ID NO: 3040 - DNA, 60 bp, Homo Sapien
tgcccacttattccagaatggcagtgtattagtaggagagctctacagctatggaacatt

SEQ ID NO: 3041 - DNA, 60 bp, Homo Sapien
tggacggagacgggtggacttcccgctggatcgaatccaaacacaagtcagattttggca

SEQ ID NO: 3042 - DNA, 60 bp, Homo Sapien
ccatagactggaaggtctttgagagctggatgcaccattggctcctgtttgaaatgagca

SEQ ID NO: 3043 - DNA, 60 bp, Homo Sapien
tcacagaatttcttcaggttgaattacctagaagtttgtcactgacttgtgttcctgaac

SEQ ID NO: 3044 - DNA, 60 bp, Homo Sapien
ccaagaatacggctctgattgcccccctccaaacacgaggcgtgtgtacatttcttatct

SEQ ID NO: 3045 - DNA, 60 bp, Homo Sapien
caatctatttaccaggacctgatcgctgcaaaatgaacccgtgccttaacggaggcacct

SEQ ID NO: 3046 - DNA, 60 bp, Homo Sapien
tgcagacttctttcgggacgaggcagagaggatcatgagggactcccctgtcattgatgg

SEQ ID NO: 3047 - DNA, 60 bp, Homo Sapien
gtgtgccaaacttgtggtaaggttgggttcttgatgccggggggtgtcctttaaccccag

SEQ ID NO: 3048 - DNA, 60 bp, Homo Sapien
gccacagcttgcagcatggtcttgactgaatgtactgttcctgttagcgttacttctcct

SEQ ID NO: 3049 - DNA, 60 bp, Homo Sapien
agtgttgagggaaaacacatcccccaaagccaacaaagaaatcttagacgaagcatacgt

SEQ ID NO: 3050 - DNA, 60 bp, Homo Sapien
ggactcaggacatttggggactgtgtacaatgagttatggagactcgagggttcatgcag

SEQ ID NO: 3051 - DNA, 60 bp, Homo Sapien
ttcgcagggataaggggtgcactttatagctatggaaacatgagattctcctctattgga

SEQ ID NO: 3052 - DNA, 60 bp, Homo Sapien
tcagaggatttccctagagattatgacgttgcagccccgctgcgaggacgtagagacggc

SEQ ID NO: 3053 - DNA, 60 bp, Homo Sapien
tcttcctactggtctctctatgcctctctacagtctcgtctcttttaccctggcccctct

SEQ ID NO: 3054 - DNA, 60 bp, Homo Sapien
agtggagggggtaagctaaatcatagtttctgacaataactgggaaggttttttcttaaa

SEQ ID NO: 3055 - DNA, 60 bp, Homo Sapien
tcatccattaagcaatccagccgagcttgaggaaagtgacgcccttggagtgaggcgagc

SEQ ID NO: 3056 - DNA, 60 bp, Homo Sapien
ttaagaggcaggctcggatggactatagctttgataccacagccgaagacccttgggtta

SEQ ID NO: 3057 - DNA, 60 bp, Homo Sapien
ccatctatcagaactaccagcgtatccgaatccaggagagtccaggcaaagtggcggctg

SEQ ID NO: 3058 - DNA, 60 bp, Homo Sapien
agtgatggttcccctgttcactctacttagcatgtccctaccgagtctcttctccactgg

SEQ ID NO: 3059 - DNA, 60 bp, Homo Sapien
ggcatatgggatgtaagatgttctttcctatatatggtttccaaagggtgcccctatgat

SEQ ID NO: 3060 - DNA, 60 bp, Homo Sapien
gcaccttcctgggcatactctgcgttaaggtggacgttttgaccgagtcgatgcgccgtt

SEQ ID NO: 3061 - DNA, 60 bp, Homo Sapien
ctgcttattttaatcacagaagccttaaggggactgatagttgtatgaagggtaggagct

SEQ ID NO: 3062 - DNA, 60 bp, Homo Sapien
tctgccagaagatcccctcaggactgcaacaggcttgtgcaacaataaatgttggcttgg

SEQ ID NO: 3063 - DNA, 60 bp, Homo Sapien
gattttaaatgtgttgtccataataccctgagttttcagacactacgcaccacagtcaag

SEQ ID NO: 3064 - DNA, 60 bp, Homo Sapien
gactgtaagtagatctcagttctgcgtttattgtaagttgataaaaacatctggaagaaa

SEQ ID NO: 3065 - DNA, 60 bp, Homo Sapien
gcacctacatcattgcttctacgcttgacgtggctctgagctcccaatctcctgggacag

SEQ ID NO: 3066 - DNA, 60 bp, Homo Sapien
agatgttggaatatatggtccaatgaagcacatccctcgcgcccgacccgccctggcagt

SEQ ID NO: 3067 - DNA, 60 bp, Homo Sapien
acggcccttcggaaagtgctgtccctgaagcagcttctgtttccggcggaggaagacaat

SEQ ID NO: 3068 - DNA, 60 bp, Homo Sapien
gactgtgccaattccatcggtaccccacgagcatcgcatcacttgccttcagtaatgatg

SEQ ID NO: 3069 - DNA, 60 bp, Homo Sapien
gttccaactctatttttgatccggattacatcaaggagttggtgaatgatatcaggaagt

SEQ ID NO: 3070 - DNA, 60 bp, Homo Sapien
gtaggttagtagcccttcagtcttaatactttatgatgctatggtttgccattatttaat

SEQ ID NO: 3071 - DNA, 60 bp, Homo Sapien
tgttgagaccaagatctgtcaagagtaagaggcaacagatagagtgtccttggtaataag

SEQ ID NO: 3072 - DNA, 60 bp, Homo Sapien
tcataatgaagacatagccgattctctgcccgggccccttgctgatgctcctccgggtct

SEQ ID NO: 3073 - DNA, 60 bp, Homo Sapien
gacaggtttagctgtttcatcagcagcctaatatatactgttaaatttgttaaggatttc

SEQ ID NO: 3074 - DNA, 60 bp, Homo Sapien
ctatgatgttaaccaacccaacaagcacgggacacctccattactcattgctgctggctg

SEQ ID NO: 3075 - DNA, 60 bp, Homo Sapien
aagtccacagtccgagtgcagaaggccatctgcagtgggttcttccgtaatgctgccaag

SEQ ID NO: 3076 - DNA, 60 bp, Homo Sapien
agaaagcaggtaatcagactggactgtatgtacttcgatgcagtcctaaggactttaata

SEQ ID NO: 3077 - DNA, 60 bp, Homo Sapien
tatttctgccaggaccgcttctactggcgcgtgagttcccggagtgagttgaaccaggtg

SEQ ID NO: 3078 - DNA, 60 bp, Homo Sapien
gcagaaggcagacaaaaagacagggcaatggttcacagtgctggagcgctaccacccaac

SEQ ID NO: 3079 - DNA, 60 bp, Homo Sapien
taatcatatctgacacttacatagtactccagcttgaatagtactcatgtgcctccgggt

SEQ ID NO: 3080 - DNA, 60 bp, Homo Sapien
ttttaggtcctttagtttgcttctgtaagcaacgggaacacctgctgagggggctctttc

SEQ ID NO: 3081 - DNA, 60 bp, Homo Sapien
gacatagattcaaatgcagctattgatcttagcaacaaagcttcattagcattcttacaa

SEQ ID NO: 3082 - DNA, 60 bp, Homo Sapien
ggaacgctcgagtctgcttgctgtgtccaacaaatatggtctggtcttcgctggtggagc

SEQ ID NO: 3083 - DNA, 60 bp, Homo Sapien
acgtgagatccgcgtcgggacagggttttaagtgacaaagaagggcgagtggcttctctg

SEQ ID NO: 3084 - DNA, 60 bp, Homo Sapien
cgccattacaatccacctccatccgcttggaaatggccttcgtcccggcctatgactggt

SEQ ID NO: 3085 - DNA, 60 bp, Homo Sapien
ttgaagctatgttccttcgttcagctgagattttcaataagaaacttccgtctgggcatt

SEQ ID NO: 3086 - DNA, 60 bp, Homo Sapien
ctcttgaactgggcgaatgtcttatttaattaccgtgagtgacatagcctcatgttctgt

SEQ ID NO: 3087 - DNA, 60 bp, Homo Sapien
ctgccagagagaccgtgaggatgaaattaatagtggggcctttgtgagctagaggctggg

SEQ ID NO: 3088 - DNA, 60 bp, Homo Sapien
aggtgggccgtaacgggcacggatcacgatgtaaattattaagcattttggttggatttc

SEQ ID NO: 3089 - DNA, 60 bp, Homo Sapien
atagtctttgcagaggtccaaatgatattcatgatggtaataaacgagatgtttgccaaa

SEQ ID NO: 3090 - DNA, 60 bp, Homo Sapien
ttttatataccacgccacccatggggggtcttaacacgtgggggggcacccgataagcag

SEQ ID NO: 3091 - DNA, 60 bp, Homo Sapien
atatacatcaacacttttgctatataacctaagtgataaccctcttttagttacctgcca

SEQ ID NO: 3092 - DNA, 60 bp, Homo Sapien
gtgataggcttactcatcaaatcatggatctcaaccttgatactatgtattactttcgaa

SEQ ID NO: 3093 - DNA, 60 bp, Homo Sapien
taaaggttttttctgattgaagctttaatggagcgttatttatttatcgaggcctctttg

SEQ ID NO: 3094 - DNA, 60 bp, Homo Sapien
atgttgccaaacgctgccagtatttcatccgcctcacccttctcatctcggtccccgtcc

SEQ ID NO: 3095 - DNA, 60 bp, Homo Sapien
gcctaacagttatggaaactacagtccttataaaccattggcatggtaataaacagatct

SEQ ID NO: 3096 - DNA, 60 bp, Homo Sapien
tcaattatagatggcaaccaaggaagctcgttcacaattgaccccgtcaggggagaagtc

SEQ ID NO: 3097 - DNA, 60 bp, Homo Sapien
agaaagtttgcaagtaatgttgaaaacgttagcggaagaacttatgcaaacacagcagat

SEQ ID NO: 3098 - DNA, 60 bp, Homo Sapien
aagggccgaatcccctacccaggcatgaataaacgggaagtgttggaacaggtggagcag

SEQ ID NO: 3099 - DNA, 60 bp, Homo Sapien
ctgatcatgcattgttgaggtggtctgaatgttctgacattaacagttttccatgaaaac

SEQ ID NO: 3100 - DNA, 60 bp, Homo Sapien
ccttcccatttccagccctaatctacagacaggaatgcccttcaggtttcttccctcccc

SEQ ID NO: 3101 - DNA, 60 bp, Homo Sapien
cctctggatttttgttcctcctgtacaagaggtgtctttgcttggtttggtggggctgcg

SEQ ID NO: 3102 - DNA, 60 bp, Homo Sapien
tattgtagagtaacccctgtgactcaatattaccatagtgcgatgtcgttttgtgctatt

SEQ ID NO: 3103 - DNA, 60 bp, Homo Sapien
ctctgggcttcccagtttgtttacccgggaaagtacgtctagattgtgtggtttgcctca

SEQ ID NO: 3104 - DNA, 60 bp, Homo Sapien
gggtctattctgagccgttaacttcctgtaaggggaaaatgggtgggttaccagaaatac

SEQ ID NO: 3105 - DNA, 60 bp, Homo Sapien
ccatgttcttggaggtcggcaaatgcattggcctcctggttaagcacgttttggggataa

SEQ ID NO: 3106 - DNA, 60 bp, Homo Sapien
acatgtgacacatatgcaccttgtgtctgtacacgtgtcctgtagttgcgtggactctgc

SEQ ID NO: 3107 - DNA, 60 bp, Homo Sapien
acccccctcattggtcacaaattgactgttacaacaccatttcatagagaccagactgtg

SEQ ID NO: 3108 - DNA, 60 bp, Homo Sapien
aaatgggtcggatagtaagcagtacaatatcatgtgtccctgtaaggaaggttcccaagt

SEQ ID NO: 3109 - DNA, 60 bp, Homo Sapien
atggagcagcctcgaaactgtgacgatgaagtgtacgagctgatgcgtcagtgctggcgg

SEQ ID NO: 3110 - DNA, 60 bp, Homo Sapien
gtccaaactgcatcgagtatttcacctcccaagggttacagagcatttaccacctgcaga

SEQ ID NO: 3111 - DNA, 60 bp, Homo Sapien
attcaccgtcagcatatgagccgaatgctgtccggtggctttggatatagccccttcctc

SEQ ID NO: 3112 - DNA, 60 bp, Homo Sapien
gcattgtagcacgcgctgtatggttgtgcgttgtagcgtgcgctgtatagttgtgatgcc

SEQ ID NO: 3113 - DNA, 60 bp, Homo Sapien
gtaatctactgttgggatggtaagaattgatgtaggctgtggtgtaagaatgaattaaaa

SEQ ID NO: 3114 - DNA, 60 bp, Homo Sapien
cacacatggaaacccataggtccacacacaggtggtgttactgtccctcctggtgtcacc

SEQ ID NO: 3115 - DNA, 60 bp, Homo Sapien
ggtctcaccagctgattctggagaatatgtgtgccgtgtggagaatggatcgggccccaa

SEQ ID NO: 3116 - DNA, 60 bp, Homo Sapien
ctgactttctcgcggcggtagacagcgcctcgcagttgctgtcgacatatttgttcctac

SEQ ID NO: 3117 - DNA, 60 bp, Homo Sapien
actctcaaacaccagcccctctatcggcagcctgtctgaagttctttgaagcccctgtca

SEQ ID NO: 3118 - DNA, 60 bp, Homo Sapien
cacacacacccgcccgaagagcctcagtgcttacactaaggagtcgtcttctatgcaata

SEQ ID NO: 3119 - DNA, 60 bp, Homo Sapien
acacaagattaataccatccagcatcaggatatagctgtggattttacaaaccattctta

SEQ ID NO: 3120 - DNA, 60 bp, Homo Sapien
gtgcgtgaggagtttaaggagctgaaagcgcgcaataccaagaaggagggtgacctgata

SEQ ID NO: 3121 - DNA, 60 bp, Homo Sapien
catccttttgttaattcttcaggggcccgttcccgactggcgccgttcgtttccgcccat

SEQ ID NO: 3122 - DNA, 60 bp, Homo Sapien
cctagtgtaacaatgaaaccagatttctcacttgctcttcatacttctattttgaggtaa

SEQ ID NO: 3123 - DNA, 60 bp, Homo Sapien
tttttaatcccgccaacgcacaatctccggaggaatgcccacgagctctcgcgttggtgg

SEQ ID NO: 3124 - DNA, 60 bp, Homo Sapien
atgctaatcaagatgaacaggtcgactttcaagaattcatatccctggtagccattgcgc

SEQ ID NO: 3125 - DNA, 60 bp, Homo Sapien
gatgctctgatttaattctagaaacaatttgattacctcttgtttgtgacaagactaagc

SEQ ID NO: 3126 - DNA, 60 bp, Homo Sapien
agacaggagcagcccacccagcagaaatacaatccgagctacaaagcatgggaaaaagag

SEQ ID NO: 3127 - DNA, 60 bp, Homo Sapien
gaagaagcttcaaagctcttggaggctttaaagttctttctgttgggtgtgcattacagt

SEQ ID NO: 3128 - DNA, 60 bp, Homo Sapien
aaatacttaattgagctactagtttctctattgtcccagggagatattagacctctcttt

SEQ ID NO: 3129 - DNA, 60 bp, Homo Sapien
acttgccccagagaagctactcggccaaacctagccagggtctgttcttgtggaccagag

SEQ ID NO: 3130 - DNA, 60 bp, Homo Sapien
gtgtacgggagtttcttggtaaatccagaatcaggatacaatgtctctttgctatatgac

SEQ ID NO: 3131 - DNA, 60 bp, Homo Sapien
taggctatttagtcccatagtagttcagatctgcttagatgtgacaggcattgaaggctg

SEQ ID NO: 3132 - DNA, 60 bp, Homo Sapien
tgcagccgaaactcatgctgagacgcacggagtccgtcgtcgaaaaactcctcacaaact

SEQ ID NO: 3133 - DNA, 60 bp, Homo Sapien
gaggaagtgcacccgccgtttttgttcagtctacccactctcagggtaacaatgcctcag

SEQ ID NO: 3134 - DNA, 60 bp, Homo Sapien
gatgcgagcactacctcagaatgacgaccattacgtcatgcaggaacatcgcaaggtgcc

SEQ ID NO: 3135 - DNA, 60 bp, Homo Sapien
ccagagtgtcaggacatgtgtgacttagcccagattcagactttagtcacaagcaggatc

SEQ ID NO: 3136 - DNA, 60 bp, Homo Sapien
atatttcatgggaatcgaacctagggatagtgctccacttctgacgatggagtgaagaca

SEQ ID NO: 3137 - DNA, 60 bp, Homo Sapien
aacttaccgatcatcgcacgccggagttcgatcacgagaccgacggggaactgtcgatct

SEQ ID NO: 3138 - DNA, 60 bp, Homo Sapien
caggaagccgtgaaactgtgtgacagctatgaaattcgccctggtaaacaccttggagtg

SEQ ID NO: 3139 - DNA, 60 bp, Homo Sapien
ataacgcagcgtgtgagtctgagcattgcgatcatcgccatggtgaacaccactcagcag

SEQ ID NO: 3140 - DNA, 60 bp, Homo Sapien
tggttacaaacacttccaatggacagccctcgaccttaactattttcgagacagcactgt

SEQ ID NO: 3141 - DNA, 60 bp, Homo Sapien
gtatgatacctgtacttaagcatcactcaagggtaagtgttctaggaaggttgatttagc

SEQ ID NO: 3142 - DNA, 60 bp, Homo Sapien
tccccacaccgtgtgtcacaacaggctagggcacttcacgatgtcactacttgtttttct

SEQ ID NO: 3143 - DNA, 60 bp, Homo Sapien
actcaaatgggttcacctcataatcctatttcatctgtatcttaaatggccccaggcatc

SEQ ID NO: 3144 - DNA, 60 bp, Homo Sapien
gctgtctaccagttgacccgaatgtgcaccatccgcatgagcttcgtcaaaggctgggga

SEQ ID NO: 3145 - DNA, 60 bp, Homo Sapien
ctatcgagactcatttgatccgcaagtctagcagcggactaacttatatcgcagagtgga

SEQ ID NO: 3146 - DNA, 60 bp, Homo Sapien
tggcagaactacgccgtaatggcactttgccttggttacgccctgattctaaaactcaag

SEQ ID NO: 3147 - DNA, 60 bp, Homo Sapien
gaattcggcagcgagtagataatatcgaagtcttgacagcagatattgtcataaatctgt

SEQ ID NO: 3148 - DNA, 60 bp, Homo Sapien
ctgcttcagcccgattgttttcgccactccattctggaacaaggtttgatatgcacaaaa

SEQ ID NO: 3149 - DNA, 60 bp, Homo Sapien
agcttaccaacttgagcggcatcgaatagaggcagctatggaccgaaagtctgatagtga

SEQ ID NO: 3150 - DNA, 60 bp, Homo Sapien
gggaccacgtctgttaccagcatcctccatatcaaagaccctaagaatcaggtggggaag

SEQ ID NO: 3151 - DNA, 60 bp, Homo Sapien
gtttttcaccggggcgtggctaccctgtcgtgacgcgtttccgcgtattgtcccctataa

SEQ ID NO: 3152 - DNA, 60 bp, Homo Sapien
agcaaaaaggtgtccctacaggcttcattctgcccattcgcgacatccgcgccagcgttg

SEQ ID NO: 3153 - DNA, 60 bp, Homo Sapien
gtttctccatcagcttatgggatccttgtctttactgacaagaatggaatagaaatgtaa

SEQ ID NO: 3154 - DNA, 60 bp, Homo Sapien
aaccaggattcttatttgtgctgttatagaatatcagctctgaacgtgtggtaaagattt

SEQ ID NO: 3155 - DNA, 60 bp, Homo Sapien
tgacatgggtgtgccaggctagactaggaggttccggtgtctggaaaagcactttacaga

SEQ ID NO: 3156 - DNA, 60 bp, Homo Sapien
tcttcacgcagagattttcatctattatactttatcaaagattggccatgttccacttgg

SEQ ID NO: 3157 - DNA, 60 bp, Homo Sapien
cgtgatgccacgtaacttaccctatggacaaaagcaggaatgactaacacatcctaggag

SEQ ID NO: 3158 - DNA, 60 bp, Homo Sapien
gattctaatcccaacaagcaagggtctccttcaagattaatgctatcaatcattaaggtc

SEQ ID NO: 3159 - DNA, 60 bp, Homo Sapien
gatgtgggccaaactgttctggatcaggaaagtcatactgttcactttcaagttggctgt

SEQ ID NO: 3160 - DNA, 60 bp, Homo Sapien
gccatggtaaatacatggcttgctgcctgttgtaccgtggtgacgtggttcccaaagatg

SEQ ID NO: 3161 - DNA, 60 bp, Homo Sapien
cctctttgtgataattctcagtagttgtccgtgataatcgtgtcctgaaaatcctcgcac

SEQ ID NO: 3162 - DNA, 60 bp, Homo Sapien
gtggaagacagcgtcatggaaggagcacttagccagcgtctctaacgtaaaatggcaaac

SEQ ID NO: 3163 - DNA, 60 bp, Homo Sapien
tttggaaagttgagtataaacaaaccgacatctgaaagaaaagtctcgctatttggcaaa

SEQ ID NO: 3164 - DNA, 60 bp, Homo Sapien
aacaagggacactcaaactaccagagaaacggaccaatggactgcgaagaactcctaaac

SEQ ID NO: 3165 - DNA, 60 bp, Homo Sapien
cattctttggtgtcccttccccttatgattttactttccacagtgaatggcatttatttt

SEQ ID NO: 3166 - DNA, 60 bp, Homo Sapien
tttcctctttttgcctttatctccccaactaaaatacaatggggaagaagtctgcctatg

SEQ ID NO: 3167 - DNA, 60 bp, Homo Sapien
cccctaccttttgtggaaccagtgatgcctcaaagacagtgtcccctccacagctgggtg

SEQ ID NO: 3168 - DNA, 60 bp, Homo Sapien
tgggcctggccagtcttcctcttagcctctggatctagaagggaccataagaggagtagg

SEQ ID NO: 3169 - DNA, 60 bp, Homo Sapien
cttaaacagcatggcgctggtacgtaaatagaccaatgcagttaggtggctctttccaag

SEQ ID NO: 3170 - DNA, 60 bp, Homo Sapien
gatttttaccagcagtgtcgggaggcattcctcgtcaatagtgatctgacactccgggcc

SEQ ID NO: 3171 - DNA, 60 bp, Homo Sapien
caaaattcatcgtcttcaagcccctctttctagccttttctactactctctgcttggtca

SEQ ID NO: 3172 - DNA, 60 bp, Homo Sapien
ttggatgcatctactcaaaccacccatgaactcaccattccaaataacttaattggctgc

SEQ ID NO: 3173 - DNA, 60 bp, Homo Sapien
acccagaacaggcttgtgttgtaatagtgtgggccgctttgtctcaaatccgcagttcta

SEQ ID NO: 3174 - DNA, 60 bp, Homo Sapien
tggaacagcagtataaggtagtaggtcccggatgagtggtctacattccagtgcagagga

SEQ ID NO: 3175 - DNA, 60 bp, Homo Sapien
aaaagaaaatggcagttatttgtgggacagggctgtgttgagacttggcatgcttctttt

SEQ ID NO: 3176 - DNA, 60 bp, Homo Sapien
ccttcaagactttgatattcgagcaattctggattgggactactacattgagcggctggg

SEQ ID NO: 3177 - DNA, 60 bp, Homo Sapien
gaccccattaagcctaaaggtgatgggtcctcgcctaggcttagtgctaccatgtgggtt

SEQ ID NO: 3178 - DNA, 60 bp, Homo Sapien
gaattgcaggccactcatgtcagtgaccagatttgtggcttataaacattagcagtttat

SEQ ID NO: 3179 - DNA, 60 bp, Homo Sapien
taatgcccgcgcgcgctggtgggcgctttataataaagcggagcatttacacacacccgc

SEQ ID NO: 3180 - DNA, 60 bp, Homo Sapien
gtcttcacaccctgattcctcaagttttctgcttagtggcactgacattaagtagtgggg

SEQ ID NO: 3181 - DNA, 60 bp, Homo Sapien
agctttggagtttgggttttcttgtccaggtgcttcataaagtcctggacccacttctgt

SEQ ID NO: 3182 - DNA, 60 bp, Homo Sapien
tcttagaattgagattgctacacggagcagtccttgacgatcgtgtttctgacgtttctc

SEQ ID NO: 3183 - DNA, 60 bp, Homo Sapien
gttctactgttttcagtttcatattacccctatatgcatcaaagctgcaacttcccttgc

SEQ ID NO: 3184 - DNA, 60 bp, Homo Sapien
cctgtcttaaggcccagggggaggttaggagactgatagcatgtgatggctcaggctgaa

SEQ ID NO: 3185 - DNA, 60 bp, Homo Sapien
accctacttttgcctgtagcccatatgctagaggttggtgaccctgacgacttggctttc

SEQ ID NO: 3186 - DNA, 60 bp, Homo Sapien
gtccacatgggaccggaacatttaaggccaggccctagagggtgggtttaagcccccaaa

SEQ ID NO: 3187 - DNA, 60 bp, Homo Sapien
catgcctggtattttcaaccataaaagaagtttcagttgtccttaaatttgtataacggt

SEQ ID NO: 3188 - DNA, 60 bp, Homo Sapien
aaagtttgcctgacgttcggaaccaagcagacgttatttacgtcaatacacagttgctgg

SEQ ID NO: 3189 - DNA, 60 bp, Homo Sapien
gcacctcccctcgcaatcagaacaagcccttcagtgtgccgcatactaagtccctggaga

SEQ ID NO: 3190 - DNA, 60 bp, Homo Sapien
gtgtgagagaagggttaagactggcttacaatgagatgcttcaaatgaaaagggaattat

SEQ ID NO: 3191 - DNA, 60 bp, Homo Sapien
tacgatacaacccctataccacccgacctaaccgtcggggtgatacttggcatgatcgag

SEQ ID NO: 3192 - DNA, 60 bp, Homo Sapien
agcgctcggtgttcacactgaactgtggggtcgacgggaggggtgccttttacatgttct

SEQ ID NO: 3193 - DNA, 60 bp, Homo Sapien
tgtgtgaagttactcgtgtcaaagccgttaggatcctggcttgcggagtggctaaagtgc

SEQ ID NO: 3194 - DNA, 60 bp, Homo Sapien
acaatcatttccaccgcttgactcacttaacttgcccctgccaccagtagattttatgaa

SEQ ID NO: 3195 - DNA, 60 bp, Homo Sapien
aaggtggggggtaggttggttgttcagagtcttcccaataaagatgagtttttgagcctc

SEQ ID NO: 3196 - DNA, 60 bp, Homo Sapien
caattttcctctccaaggaatgcacccacgagccaacatcatgagaccccggacaaacac

SEQ ID NO: 3197 - DNA, 60 bp, Homo Sapien
agttaaagtcctaattggatttgtaccgtcctcccattttgttctcggaagattaaatgc

SEQ ID NO: 3198 - DNA, 60 bp, Homo Sapien
gtgagctttgcagttacacgtgtccacggcgttcaaatttggatcgtcacatgaaaagcc

SEQ ID NO: 3199 - DNA, 60 bp, Homo Sapien
acttgtgtacctaagtgaccgccccacctgtggcttatacgtggcgtggcctctttcttc

SEQ ID NO: 3200 - DNA, 60 bp, Homo Sapien
ttggttggagttccatcttgcaagggataatacaaatcctatgatctctatgcccaatat

SEQ ID NO: 3201 - DNA, 60 bp, Homo Sapien
tggcctgcagcaagccatcgtggttggctggaactagacgtgtgatttgaatgcaggagt

SEQ ID NO: 3202 - DNA, 60 bp, Homo Sapien
actcattgctgattggaacaccaggaggaggttggatttctgccagtgggggatgtttct

SEQ ID NO: 3203 - DNA, 60 bp, Homo Sapien
ttgtgaagtgcggaaaaccagaggcgcagtcatgtcgggattcgacgatcctggcatttt

SEQ ID NO: 3204 - DNA, 60 bp, Homo Sapien
agcctgggaacctctcagagaaggtctctcacttggagtccatgctcaggaagctgcagg

SEQ ID NO: 3205 - DNA, 60 bp, Homo Sapien
gccctgaatggaactactttaactaatccatagggacttctggtatgctttcctctcttt

SEQ ID NO: 3206 - DNA, 60 bp, Homo Sapien
agcaaaataggaaacggggtcgcataggacaatctctagtgcttgtaaatctaaggaaat

SEQ ID NO: 3207 - DNA, 60 bp, Homo Sapien
tcaacgctttaggctgagtcactcctcgggtctctccataattcagcccaacaatgcttg

SEQ ID NO: 3208 - DNA, 60 bp, Homo Sapien
accagaaggtctgctaaaaggtcagagtaatgcagaatgcgtgccttcatctcagatttg

SEQ ID NO: 3209 - DNA, 60 bp, Homo Sapien
agattttccctcaaagaccatgatggtatcggactagttttcagacactgcctgttgctg

SEQ ID NO: 3210 - DNA, 60 bp, Homo Sapien
ctctataagtctagtgttcatggaggtagcattgaagatatggttgaaagatgcagccgt

SEQ ID NO: 3211 - DNA, 60 bp, Homo Sapien
gggcagccctgtcggcaaggagcgtgcatactgcgtttgtgtaattgtttgctgtatctc

SEQ ID NO: 3212 - DNA, 60 bp, Homo Sapien
ggtctcgctatcaagatccaacgcagtaatggtttaattcacagtgccaatgtaaggact

SEQ ID NO: 3213 - DNA, 60 bp, Homo Sapien
aatcgaaaaggtggattcaacagacctttggatttcattgcatgagaattgaagtgttga

SEQ ID NO: 3214 - DNA, 60 bp, Homo Sapien
aggggaaataaggcttgctgtttgttctcctggggcgctccctccaacttttgcagattc

SEQ ID NO: 3215 - DNA, 60 bp, Homo Sapien
ggcgtgatcgggatcgactttgggcatgcgtttggatccgctacacagtttctgccagtc

SEQ ID NO: 3216 - DNA, 60 bp, Homo Sapien
tcttccaaagaggctagaacgtcagataaacatgattccactcgtgcttcctcaaataaa

SEQ ID NO: 3217 - DNA, 60 bp, Homo Sapien
cctagatctttcttgaagacttgaattagattacagcgatggggacacagaaggtcaccc

SEQ ID NO: 3218 - DNA, 60 bp, Homo Sapien
agggggttgtagagcgactgcacataggggaaaacacacttggggtcaggctttttgccc

SEQ ID NO: 3219 - DNA, 60 bp, Homo Sapien
atgcaagtatactagcagaaaaattgggccatagtatcgtggatttccaggtattttctg

SEQ ID NO: 3220 - DNA, 60 bp, Homo Sapien
gaaacgctgagtattcgaggaaataacattcggtattttattctaccagacagtttacct

SEQ ID NO: 3221 - DNA, 60 bp, Homo Sapien
gatgctttatagtagatcacttaaatactggatcttttgctagtgtgaaaacattgggaa

SEQ ID NO: 3222 - DNA, 60 bp, Homo Sapien
cttcagttatagtaactgactggtatattcattcagaagcgccataagtcagttgagtat

SEQ ID NO: 3223 - DNA, 60 bp, Homo Sapien
aaaatccagtacatggctcgtggagagaagtctttggcctatcatgaatggaaaatggcc

SEQ ID NO: 3224 - DNA, 60 bp, Homo Sapien
tatgctttcaggctacaaccactagcacggctgacgatggccctttctgcggagaccgag

SEQ ID NO: 3225 - DNA, 60 bp, Homo Sapien
gcccgattacttcaaccaccgagtgatcggggcacaagttgaccagtctgtcttcgagga

SEQ ID NO: 3226 - DNA, 60 bp, Homo Sapien
tgtctgtgtcttctatttggcaaacagcaatgatcttccaataaaagatttcagatgctc

SEQ ID NO: 3227 - DNA, 60 bp, Homo Sapien
gcaccttaaattattagaccccggggcagtcaggtgctccggacacccgaaggcaataaa

SEQ ID NO: 3228 - DNA, 60 bp, Homo Sapien
cgcttatgtcggtgtcccaacgtataaactatcacagtagcgctcatggctcgtaggttt

SEQ ID NO: 3229 - DNA, 60 bp, Homo Sapien
tgagccagaggccactaggtattcttgctcccagaggctgaagtcaccctgggaatcaca

SEQ ID NO: 3230 - DNA, 60 bp, Homo Sapien
aatgggatgagggaagtttccagcagatttcaggctgttcttaaagtttttgttggtcat

SEQ ID NO: 3231 - DNA, 60 bp, Homo Sapien
caaaaacaccaacatacaagtcttgacaacagcatctggtctactagactttcttacaga

SEQ ID NO: 3232 - DNA, 60 bp, Homo Sapien
gaagcagtcacgaccattgctgcatattggcatgggacccaggtacgtagagaatacagg

SEQ ID NO: 3233 - DNA, 60 bp, Homo Sapien
ataaggggggcttacacagttgccctaatgcggctggaatccccattgggggtaggtgag

SEQ ID NO: 3234 - DNA, 60 bp, Homo Sapien
caaccgcccgtttgatcgccgggcgtggtgattttttgtgagctccgcacacctactttc

SEQ ID NO: 3235 - DNA, 60 bp, Homo Sapien
ttattgtgccaatatgccctccaaaccctcccaggattcaaagctaggtttggctgtctg

SEQ ID NO: 3236 - DNA, 60 bp, Homo Sapien
agaaatttgccttgtccctttgtgtacaaccatgcaaaactgtttgttggctcacagaag

SEQ ID NO: 3237 - DNA, 60 bp, Homo Sapien
attaattcccaatcccccattccaccagggctgggagcccattcccagtgcttcccaagg

SEQ ID NO: 3238 - DNA, 60 bp, Homo Sapien
agtgtctgagatatccaggagattcattaggtcatcagcgatcaaaggttagcattttat

SEQ ID NO: 3239 - DNA, 60 bp, Homo Sapien
tacaggggcaaacagatggaggacggccataccctcttcgactacgaggtccgcctgaat

SEQ ID NO: 3240 - DNA, 60 bp, Homo Sapien
gcctgacctgatgaactgttaatatctggtgaggttgagttatcatgctactaatatttt

SEQ ID NO: 3241 - DNA, 60 bp, Homo Sapien
tgaacagttttcactggggttgagatcaaatcacagaacagtgtcaggggccctggaagg

SEQ ID NO: 3242 - DNA, 60 bp, Homo Sapien
atttgtctcccgccctaagtcctccagtctccttagagctagtacttactaagcatttac

SEQ ID NO: 3243 - DNA, 60 bp, Homo Sapien
aaagctctttcatctatagtttggccaccatacagtggcctcaaagcaaccatggcctac

SEQ ID NO: 3244 - DNA, 60 bp, Homo Sapien
tctattgtctttttaaatggcacaattttaagggtttgagggtacagtcccttaacctgc

SEQ ID NO: 3245 - DNA, 60 bp, Homo Sapien
gaacaatacaccctctccgcccttggggtaatgtactttgtgatattgccacccgccccc

SEQ ID NO: 3246 - DNA, 60 bp, Homo Sapien
aaaggatcaaccacatggggttctgcggtgataatgagcacatagtgaggggtcagcaaa

SEQ ID NO: 3247 - DNA, 60 bp, Homo Sapien
tgaccactgttcctcagttgaccaccgcttctcagctgaccgctgttcctcagttgacca

SEQ ID NO: 3248 - DNA, 60 bp, Homo Sapien
ggtgatatacaggtcttatatccccatatggaatttatccatcaaccacataaaaacaaa

SEQ ID NO: 3249 - DNA, 60 bp, Homo Sapien
accagcaattatgtgacctgctttcgatcataagactgtgttaagaccttctcctcagtg

SEQ ID NO: 3250 - DNA, 60 bp, Homo Sapien
ccccggaaagatgattttgatcaagcacaggtaatcaggactgtcctcaggactttatgt

SEQ ID NO: 3251 - DNA, 60 bp, Homo Sapien
acatgaaagcacccagcgatgtgttgcagaaattatagctggtttaatcagaggttctaa

SEQ ID NO: 3252 - DNA, 60 bp, Homo Sapien
tcgatcgcgatgtaagtcgcgagccggcaatcgcgtgtgcacatactcgcagatccttct

SEQ ID NO: 3253 - DNA, 60 bp, Homo Sapien
tgtcagttacagtcctagatatacttactgctggtacagttgtactctaagattggtatt

SEQ ID NO: 3254 - DNA, 60 bp, Homo Sapien
ctgcaagaaactgggctgctaaataaatgtgagcgaattcaaggtcgaaaagccagcctg

SEQ ID NO: 3255 - DNA, 60 bp, Homo Sapien
aaatttgagactacctttatattctccaacacaagaccgtgtaggtgtcccttcagagag

SEQ ID NO: 3256 - DNA, 60 bp, Homo Sapien
catggagattagctgccgtctcaacgaggataaagacacccacacatcacttggggtccc

SEQ ID NO: 3257 - DNA, 60 bp, Homo Sapien
caaacatcaaaacagtgcttcagccaaattccatatgtaatgccattgggagagtattga

SEQ ID NO: 3258 - DNA, 60 bp, Homo Sapien
aaggaacccaggtcgagatgggacattgtgcggctcatcccacctcagacgtacctgcaa

SEQ ID NO: 3259 - DNA, 60 bp, Homo Sapien
acgggcacatacaggaaaacacggtaatgtaattagaatagtcagagaaaagtagccaga

SEQ ID NO: 3260 - DNA, 60 bp, Homo Sapien
aagttaaaagcccggcgatctgagtgtaattccaaagctacccacgcaaggaatgattat

SEQ ID NO: 3261 - DNA, 60 bp, Homo Sapien
cagacttttaaggcattccaaatcccagtcttcatgttgaactgggttaagcatttatta

SEQ ID NO: 3262 - DNA, 60 bp, Homo Sapien
tataatattgggaccccataccgttagcccttgtatgtataccaacactgccaaagtaaa

SEQ ID NO: 3263 - DNA, 60 bp, Homo Sapien
agcagtggagagctcggctcaaagtgcgaagttgtttagatttccacgttacacaaacac

SEQ ID NO: 3264 - DNA, 60 bp, Homo Sapien
ccaattctgggtatatcagtgtgtcttgcagaatcttggatcattaaagataaacatatt

SEQ ID NO: 3265 - DNA, 60 bp, Homo Sapien
atggtctgcttttaaatgtgacttaatctgactgcagtaactagtacagttcaataaagg

SEQ ID NO: 3266 - DNA, 60 bp, Homo Sapien
atcccggtggacatgatctcactagccaagcagatcatcgaagccacaccggagcggatt

SEQ ID NO: 3267 - DNA, 60 bp, Homo Sapien
ggagaacaccccagttttagaggatgtccttgggaggatcgcaaagcagtctggtgagct

SEQ ID NO: 3268 - DNA, 60 bp, Homo Sapien
gggagaacctactcaagaggtgtctaaattcaaactttccaccaaggtagaaagcacggg

SEQ ID NO: 3269 - DNA, 60 bp, Homo Sapien
ctctttgtatttatggattcctttttaccgtgtcacatttactttggtcctctatgtatt

SEQ ID NO: 3270 - DNA, 60 bp, Homo Sapien
aagacatgaacgttttctcttcaccgccgtggggtgtattgactggtcccccatgggctg

SEQ ID NO: 3271 - DNA, 60 bp, Homo Sapien
ccaatgtctggactttttggttccatctgggccccgcaaagcgatgtgtatgaaaattgc

SEQ ID NO: 3272 - DNA, 60 bp, Homo Sapien
aaagccgaccagccaaataacaggacgtcaccagggatggcccagaaagggtacagtgag

SEQ ID NO: 3273 - DNA, 60 bp, Homo Sapien
agaggtgatcagttcagctgttgacgccttgcagaggctttgtagagcatctgcagagac

SEQ ID NO: 3274 - DNA, 60 bp, Homo Sapien
ggcattttcagtgtactgccagtgcaggcgaccactgcctacacagatccacattaaatc

SEQ ID NO: 3275 - DNA, 60 bp, Homo Sapien
gatgatccagccgactttgacactgttatctccgtaatagctttaccattaggctaggat

SEQ ID NO: 3276 - DNA, 60 bp, Homo Sapien
ctgaaacctcaagagtgctgtaaggtacaggtttccatattgtgaacctgtgtacgcaca

SEQ ID NO: 3277 - DNA, 60 bp, Homo Sapien
ggaatggaacgacagtacttcagtccaaaatccaactcgcctccgagaagcatccaaaag

SEQ ID NO: 3278 - DNA, 60 bp, Homo Sapien
cttcccctgttatcctggtctaataaccccccacacatacacctctggtgacctatttgc

SEQ ID NO: 3279 - DNA, 60 bp, Homo Sapien
cagatctttgatatcgtactgaggtaacttccacgtagccccttgccacgcggcaccggt

SEQ ID NO: 3280 - DNA, 60 bp, Homo Sapien
aacagccgtaacaggtcaaccttgtggagccatcgcgagttagagggtgaaagatggcag

SEQ ID NO: 3281 - DNA, 60 bp, Homo Sapien
catgttgcgctggctaactggcagaaccacgcatccctacggttgttgaatctagtctat

SEQ ID NO: 3282 - DNA, 60 bp, Homo Sapien
agcatattgccaagtatctacaggcagaggcggtaaagaaagaccgactggatttccacc

SEQ ID NO: 3283 - DNA, 60 bp, Homo Sapien
agttgtagctgccatcagatgccggagactcgcccttcaataaaaaatctcttctagctg

SEQ ID NO: 3284 - DNA, 60 bp, Homo Sapien
cggttaaaagcacagtctatggaacgctaatggagtcagcccctaaagctgtttgctttt

SEQ ID NO: 3285 - DNA, 60 bp, Homo Sapien
cagatacgtaggcccatgaaattgatgaactgagagttgcttccagtcctgagcgcacca

SEQ ID NO: 3286 - DNA, 60 bp, Homo Sapien
agcccaatatttgcttaccaaactggacatcattgatgatctggattcaggcagggtctg

SEQ ID NO: 3287 - DNA, 60 bp, Homo Sapien
aaatcgaggacttcgaggctcgcatcgcgctgttgccactgttacaggcagaaaccgacc

SEQ ID NO: 3288 - DNA, 60 bp, Homo Sapien
ccaacaccgtcatacatatacctccgctacgcaaccttacctagttacgccccaattgta

SEQ ID NO: 3289 - DNA, 60 bp, Homo Sapien
tccggcggtgctcgcaagcgaggcagccatgtcttatcccgctgatgattatgagtctga

SEQ ID NO: 3290 - DNA, 60 bp, Homo Sapien
tgtgtaagggaggtccatagaatttaggtggtctgtcaactattctacttatgagagaat

SEQ ID NO: 3291 - DNA, 60 bp, Homo Sapien
atatctgtttggattatagctaggatttggagaataagtgtgtacagatcacaaaacatg

SEQ ID NO: 3292 - DNA, 60 bp, Homo Sapien
aaaggtagacctgctgttaatgatccagcattggtcacaatgtaccaactgctttctgca

SEQ ID NO: 3293 - DNA, 60 bp, Homo Sapien
ttatatagtgttattcatggttcagctgatcttaacaaaattcgtagcagtggaaccttg

SEQ ID NO: 3294 - DNA, 60 bp, Homo Sapien
ctgacatcccgacaggaaagactagcccatatatcctgcgaagaacaaccatggcaactc

SEQ ID NO: 3295 - DNA, 60 bp, Homo Sapien
aacctgagctttaggacctttaaaatctcagcatgccttttaagctagtacttttcctgt

SEQ ID NO: 3296 - DNA, 60 bp, Homo Sapien
gaagcatcaagcctggggtaattggaggatccaaaccaaaggtcgccacacccaaagtgg

SEQ ID NO: 3297 - DNA, 60 bp, Homo Sapien
ttgcgtctttcttgtgactaaccaccctgatatagtattaaccactgtgttcaagagtaa

SEQ ID NO: 3298 - DNA, 60 bp, Homo Sapien
ggcggaatggtgtctcagatgttgtgaaaattaacttgaattctgaggaggaggcccttt

SEQ ID NO: 3299 - DNA, 60 bp, Homo Sapien
aatgagtctgttgtgtgtcatgccagtgagggacgtcagacttggctcagctcggggagc

SEQ ID NO: 3300 - DNA, 60 bp, Homo Sapien
aaaattcaagtacacacatcagtgttggttactatgcagagaatgtcattgtgtatagtt

SEQ ID NO: 3301 - DNA, 60 bp, Homo Sapien
tcttcaatgacaggcttggactagctgtggcccagacatcggccctgcccagaattgcca

SEQ ID NO: 3302 - DNA, 60 bp, Homo Sapien
acacatgcctcctaagagaggagtgcattgctttagtacccgggccagttgagactgaaa

SEQ ID NO: 3303 - DNA, 60 bp, Homo Sapien
ggcagctgtgatttccctccagtctgcttatcgtggctggaaggttcggaaacagattag

SEQ ID NO: 3304 - DNA, 60 bp, Homo Sapien
tgtgctcgtcccaccctagggactcagccacttgcagaacaggatgggaccgagatttca

SEQ ID NO: 3305 - DNA, 60 bp, Homo Sapien
ataagccctcttctaaggcatgtgatgcttgcttgacctcaaggcctattgattcagtgc

SEQ ID NO: 3306 - DNA, 60 bp, Homo Sapien
cggagaatagagtacattgaagctcgggtgacaaaaggtgagacactcacctagaacagt

SEQ ID NO: 3307 - DNA, 60 bp, Homo Sapien
aggggctgttgtgagcccattggtatagcaactagtggtgctgtctactgcaaagcaaat

SEQ ID NO: 3308 - DNA, 60 bp, Homo Sapien
gtaagcggaataaactagagaagggagacattgtttggatttcctttatactgtgaagtt

SEQ ID NO: 3309 - DNA, 60 bp, Homo Sapien
ggaagacaccatacaatcttggattcatgcagaacctggcagatttctttcagtgtggct

SEQ ID NO: 3310 - DNA, 60 bp, Homo Sapien
taaccaagattgccctatagaatggttccattatggctgcgttggattgacagaggcacc

SEQ ID NO: 3311 - DNA, 60 bp, Homo Sapien
agatcatagttccgtgagcgagcaattcagggactcggcgagcatgcactccggcaggta

SEQ ID NO: 3312 - DNA, 60 bp, Homo Sapien
ccaactatacttcgatcaccaatgtacctccagacgtaactgtgctcacaaacagccctg

SEQ ID NO: 3313 - DNA, 60 bp, Homo Sapien
ctaccatttttgattaacatcgctatcactcttgaccttactcccggttggcctgggggc

SEQ ID NO: 3314 - DNA, 60 bp, Homo Sapien
aacacgaaacatacggccataaaactccttattagagagtctacagataaatctacagag

SEQ ID NO: 3315 - DNA, 60 bp, Homo Sapien
cgttttccccgtactagatggttagggcgcatagtgccgaactacgctgctgctacagaa

SEQ ID NO: 3316 - DNA, 60 bp, Homo Sapien
tggctccacggtcatcgcccacacagctaccactcacgcttcagtcatccagactgtgaa

SEQ ID NO: 3317 - DNA, 60 bp, Homo Sapien
gagaatgcatctttgacagttatcttatttgtaaggcagcctataaaatagttctgaagt

SEQ ID NO: 3318 - DNA, 60 bp, Homo Sapien
caggaccagccagtttacaagcatgtctcaagctagtgtgttccattatgctcacagcag

SEQ ID NO: 3319 - DNA, 60 bp, Homo Sapien
agcaccatgcattatgatgggcatgtccgcttcgaccttcccccacaaggctctgtgctg

SEQ ID NO: 3320 - DNA, 60 bp, Homo Sapien
attcgaacattctagaggggacatccacaagtctcggtgcagttatgatggtgtgggatg

SEQ ID NO: 3321 - DNA, 60 bp, Homo Sapien
tggatccattactcaacccttacctagcagttatttgatcatccgagctacttcagagtc

SEQ ID NO: 3322 - DNA, 60 bp, Homo Sapien
caagattaccttcttaatggacctcctgatacaccagttgacggtttatgttccagatga

SEQ ID NO: 3323 - DNA, 60 bp, Homo Sapien
tcagccacgatcctctggacagagatttgtggcgaagacctgacgagagactgtaaagga

SEQ ID NO: 3324 - DNA, 60 bp, Homo Sapien
aagacacctttcatcgacatgatcaattctgtacccctaagacagatttatggttgtccc

SEQ ID NO: 3325 - DNA, 60 bp, Homo Sapien
aggtgcagctgccgaaagtgtcagagattcggctgccggaaatgcaagtgccgaaggttc

SEQ ID NO: 3326 - DNA, 60 bp, Homo Sapien
tctcctacccatacttggaggccccgctcagacggtcctgaaaacgtctgaaaggcggtt

SEQ ID NO: 3327 - DNA, 60 bp, Homo Sapien
aaggaccaggcacctatgaggattatgtcgaaggacttcgggtgtttgacaaggaaggaa

SEQ ID NO: 3328 - DNA, 60 bp, Homo Sapien
cagacagacttgaggtatgtcgagagtaccaacgtggcaattgcaaccgaggagaaaatg

SEQ ID NO: 3329 - DNA, 60 bp, Homo Sapien
cctttttgaccagtgtcatcatcttttccaaaagcagagtataaagaaatcttgtggctc

SEQ ID NO: 3330 - DNA, 60 bp, Homo Sapien
ctctccgatttgtgtgtgcggcgttgtctttacttgtacgcctcccgtgagaccactctg

SEQ ID NO: 3331 - DNA, 60 bp, Homo Sapien
caaccctcgatgagaccatcaacaatctccatttccgttttcttggacatcaggattctc

SEQ ID NO: 3332 - DNA, 60 bp, Homo Sapien
tcacccacctcactatactctcccttatcgcgcgtctatatggccccgatcacccttccg

SEQ ID NO: 3333 - DNA, 60 bp, Homo Sapien
tggaagacgcctacattctgcggggagatgatgattccctctccgacaagcatggctgcc

SEQ ID NO: 3334 - DNA, 60 bp, Homo Sapien
acttatgtgtttgtggagatgttggtgtaaacctactgcactgctaattctataaaagta

SEQ ID NO: 3335 - DNA, 60 bp, Homo Sapien
gaaaaactattcctaatcaacatggagtggagagtttattcactgtcttatctgcagaaa

SEQ ID NO: 3336 - DNA, 60 bp, Homo Sapien
ttcttctcactctctgtcgtagacacaccgataggaccaatggccaatagatattaaaag

SEQ ID NO: 3337 - DNA, 60 bp, Homo Sapien
tgatcctgttagcaggtggtaataccatgggtgctgtgacactaacagtcattgagaggt

SEQ ID NO: 3338 - DNA, 60 bp, Homo Sapien
attttgcacaagaacaatgcccctgtgcagatattacaggagtatgtcaatctggtggaa

SEQ ID NO: 3339 - DNA, 60 bp, Homo Sapien
agtggatcatctggggaatgccatccccactgtagaaatgctgcctcaaaaatgttctgg

SEQ ID NO: 3340 - DNA, 60 bp, Homo Sapien
gcaaacctggtcagagccagtgttccctccatgggacctaaagacagtgccaagtgcctg

SEQ ID NO: 3341 - DNA, 60 bp, Homo Sapien
ggagtccgtttttgaggtcacgcggctagtaattggagcctggtttagaaccaagtcagt

SEQ ID NO: 3342 - DNA, 60 bp, Homo Sapien
ccctggaagataggtagcaactagactgtcgtttttggtggagcggttcatttatttgga

SEQ ID NO: 3343 - DNA, 60 bp, Homo Sapien
atgcagatgtccacacgaggggtcggagttacctgatcacatcgagagagtgctgggcag

SEQ ID NO: 3344 - DNA, 60 bp, Homo Sapien
aatgaagactttggatttattaaaaccaagttgtccctaaggaatcagatgtgggcatct

SEQ ID NO: 3345 - DNA, 60 bp, Homo Sapien
tacagaatgcaaacacgagcacactctcttcgaacccaattgtgggtgtagcaatgaaag

SEQ ID NO: 3346 - DNA, 60 bp, Homo Sapien
cctggtatcacttgctcgctactttctagggtcttaatagtagtcaagaaaagggatctg

SEQ ID NO: 3347 - DNA, 60 bp, Homo Sapien
ccagccatgcttttgtaacttgccaggtggacttgaccaactacattaccatgctgtgcc

SEQ ID NO: 3348 - DNA, 60 bp, Homo Sapien
agctcccgcgactgctacgtgctcattagtgttcgtccgacgacgaccgtcatatgtcca

SEQ ID NO: 3349 - DNA, 60 bp, Homo Sapien
taccagggatggcccctggcttggcctgcgaaggtgaacctgcccagatttatcagtaga

SEQ ID NO: 3350 - DNA, 60 bp, Homo Sapien
acagaccatatggatcgtcttccccgggatgtggctcgggatcgcatgcaccatgacatt

SEQ ID NO: 3351 - DNA, 60 bp, Homo Sapien
tggaagtcgtttttcctaactaggactcaactatgaggggcgaggagccctttatgaaaa

SEQ ID NO: 3352 - DNA, 60 bp, Homo Sapien
cagattattgcacgtctgtgatttgagaggtgagttatttaagaggccagttttcaggac

SEQ ID NO: 3353 - DNA, 60 bp, Homo Sapien
ctctggtattaatgaatctagtgccttttaaatgtatcccacgttttgttccctaccatc

SEQ ID NO: 3354 - DNA, 60 bp, Homo Sapien
tggtggaaactcaagtgtgtctactttgtgagaactgggttgtgcacttaaaactggtgt

SEQ ID NO: 3355 - DNA, 60 bp, Homo Sapien
catggaatgtaggtgtctgcttcacatcttttagtaggtatagcttgtcaaagatggtga

SEQ ID NO: 3356 - DNA, 60 bp, Homo Sapien
cagatgggtgatttaagtgagtcacaagtcacaaaactttgctattcatagttaatcaaa

SEQ ID NO: 3357 - DNA, 60 bp, Homo Sapien
aatgcctgttgtgagatgaacctcctgtaacttctatctgttcttttttgaggctcaggg

SEQ ID NO: 3358 - DNA, 60 bp, Homo Sapien
tgctaaccgttctcagccctgagccttggagaggagggctgtaacgccttcagtcagtct

SEQ ID NO: 3359 - DNA, 60 bp, Homo Sapien
cagcctggttcacaaatctccagaccccttcggagcagtagcagctcagaagttcagcct

SEQ ID NO: 3360 - DNA, 60 bp, Homo Sapien
caagacctcattcaattgatgggagagtagttgagccaaaacgtgctgtagcaagagagg

SEQ ID NO: 3361 - DNA, 60 bp, Homo Sapien
tatttctaaacttgaaaactgctttggagaaataccacgacggtattgaaaaggcagcag

SEQ ID NO: 3362 - DNA, 60 bp, Homo Sapien
tcttccagttatgcagcacctggctaagaatgtagtcatggtaaatcaaggacttacaaa

SEQ ID NO: 3363 - DNA, 60 bp, Homo Sapien
acaagttccgtcgccttgtgaaagccccaccgagaaattactccgttatcgtcatgttca

SEQ ID NO: 3364 - DNA, 60 bp, Homo Sapien
accatgtgtgctgttttcagatgtgattgaggggtgttctgccctgcctccactgtcaca

SEQ ID NO: 3365 - DNA, 60 bp, Homo Sapien
ttgaggatgttcccaaagttttgtccaatcttatcattagtagattttataagccacaga

SEQ ID NO: 3366 - DNA, 60 bp, Homo Sapien
tacttggcgtcttagatcccccctcggagtagcggctcacgcaacacaaagtatagcaca

SEQ ID NO: 3367 - DNA, 60 bp, Homo Sapien
aatctgtgttccaaaagtggacatagcatgtacaggcagttttctgtcctgtgcacaaaa

SEQ ID NO: 3368 - DNA, 60 bp, Homo Sapien
gccttttcactgggagaatctggaaaaacctccataaggtatatagcaatctttgatctt

SEQ ID NO: 3369 - DNA, 60 bp, Homo Sapien
atgtgtcacgatagatacatttcccgtatacttctgcgactatatctctctgtatttcta

SEQ ID NO: 3370 - DNA, 60 bp, Homo Sapien
tctagttccactgtggaattcctttctggttgtacatttgctaggtagtgacaactaatg

SEQ ID NO: 3371 - DNA, 60 bp, Homo Sapien
gacatcagcaccctagaccagaagctgcgtctggtcacttccgacttccaccagctaatc

SEQ ID NO: 3372 - DNA, 60 bp, Homo Sapien
gttgtgtgttaatgttagactatccctttgtgagtgacactttaacagcattcactgctt

SEQ ID NO: 3373 - DNA, 60 bp, Homo Sapien
aatccttagagagggtaaccaggaagttccgtttgacgtacctgagttgtggtatgaaga

SEQ ID NO: 3374 - DNA, 60 bp, Homo Sapien
cgagatgaatacgctccacccaaagccgaactggatgcccgattacacggtgatctggtt

SEQ ID NO: 3375 - DNA, 60 bp, Homo Sapien
gtgagtttgtctgatgttctaccacaacgtggcgtctgataacagtgagggggggtgggg

SEQ ID NO: 3376 - DNA, 60 bp, Homo Sapien
ggcactttcactgcctgtcactgatcagcagatactgacttgttgccattaagtgaactt

SEQ ID NO: 3377 - DNA, 60 bp, Homo Sapien
ccactcactaccttggcgtcgttttttgggtctgacttgtctcgtcaactgctggtctct

SEQ ID NO: 3378 - DNA, 60 bp, Homo Sapien
ggatatagtgttcctgctttgtttaataagaacctcatttaaacttgacagctatggtat

SEQ ID NO: 3379 - DNA, 60 bp, Homo Sapien
gtcactagaactttaatgatagagactaggatgcggaagcgagcgcccctccccggggca

SEQ ID NO: 3380 - DNA, 60 bp, Homo Sapien
ccttgaactgagagcctgtatctggatttagcacttgaaagatctaactggatatttggg

SEQ ID NO: 3381 - DNA, 60 bp, Homo Sapien
aatagttacctcaaggcctactgaccaaattgttgtgttgagatgatatttaactttttg

SEQ ID NO: 3382 - DNA, 60 bp, Homo Sapien
aacccaagatgcttgtgcaaaaatgcgggctaactgtcagaagtctacagagcaaatgaa

SEQ ID NO: 3383 - DNA, 60 bp, Homo Sapien
ttcctccaggcttgtaatacccttcacatggaagattaatgagggaaatctttatattct

SEQ ID NO: 3384 - DNA, 60 bp, Homo Sapien
tttcacacccaggaacctaatcaacttccagtgattgaagtacaaaaacttcctcatctc

SEQ ID NO: 3385 - DNA, 60 bp, Homo Sapien
ttgtggcctataactcagccgggacctctcgtcccactccggtggtcttctcagaaagca

SEQ ID NO: 3386 - DNA, 60 bp, Homo Sapien
tcaaccaagtatctgtgcaccccatggtcccttcaagttgacacttgaaattacccatca

SEQ ID NO: 3387 - DNA, 60 bp, Homo Sapien
gagcccagggctaaaatcagtgctatctacaagccgaaatttaagcaacaactgtgacac

SEQ ID NO: 3388 - DNA, 60 bp, Homo Sapien
gtacaatgaaggaatcctaattgtatgggacccatctgtataccactcagatatcccaaa

SEQ ID NO: 3389 - DNA, 60 bp, Homo Sapien
aaggaccagccactttgaacgccttagaggcaaaaagagctttgtgagttgtaagaggaa

SEQ ID NO: 3390 - DNA, 60 bp, Homo Sapien
ggatttctcctggactccatgtgcagatgcctagtatttccattctgaccgttgccctcc

SEQ ID NO: 3391 - DNA, 60 bp, Homo Sapien
agctaccgccaccaagttcatagtccgatcgaaggatggtccctcttacttcactgtctc

SEQ ID NO: 3392 - DNA, 60 bp, Homo Sapien
caggggccttgtctctcactgcatttggtcaggggggcatgaataaaggctacaggctcc

SEQ ID NO: 3393 - DNA, 60 bp, Homo Sapien
tggaccccgttccgtaggcaataacgtgcgtccgcctcagcgcgagattaggagttcaaa

SEQ ID NO: 3394 - DNA, 60 bp, Homo Sapien
gtgaacatgagttccgaattcctgcgtttcaagtggggaatcgggcgcctgattgctgag

SEQ ID NO: 3395 - DNA, 60 bp, Homo Sapien
actttcagtctcgtcctgacacgattccaaaggtctgccatactcttcagaggagttcgg

SEQ ID NO: 3396 - DNA, 60 bp, Homo Sapien
gagtatatgtaggaggtgggatatcacttccatgacataagtgctattgcagagccgtgg

SEQ ID NO: 3397 - DNA, 60 bp, Homo Sapien
tatgtttgtatttggggtgtccctccggctctaggcggcctctgacctgctgtctactcc

SEQ ID NO: 3398 - DNA, 60 bp, Homo Sapien
tgtcgtgtccatccttccttcgtctggctcgtgattcacttattcgccctccctactttg

SEQ ID NO: 3399 - DNA, 60 bp, Homo Sapien
atgcaggtcggggacgcatacctgattgtctactcaatcacagaccgagcgagcttcgag

SEQ ID NO: 3400 - DNA, 60 bp, Homo Sapien
cattcctgctactctacctgtatttctcagttgcagcactgagtggtcaaaatacatttc

SEQ ID NO: 3401 - DNA, 60 bp, Homo Sapien
ggaagaaaagggtcccctagttgaggatagtcaggagcgtcaatgtgcttgtacatagag

SEQ ID NO: 3402 - DNA, 60 bp, Homo Sapien
gagccgaagtggggttcagataatgcacgtgtttcgaatcccactgtgatatgccaggaa

SEQ ID NO: 3403 - DNA, 60 bp, Homo Sapien
cgcaacatgcaattatattaaactcggccaaaccctctgcgggataaaggggttttgttt

SEQ ID NO: 3404 - DNA, 60 bp, Homo Sapien
ggtctggaagaaacatgtatcaagcaacacagccccttatcccagatagaaaagtgtctc

SEQ ID NO: 3405 - DNA, 60 bp, Homo Sapien
tgagctgtgtggtctgtccagctttcacacattgatatgtgaggctacatttgcatgtta

SEQ ID NO: 3406 - DNA, 60 bp, Homo Sapien
aagtggtgtccgcaaagcccaaggtgcataatcgtcaacctcgaattaactcctacgtgg

SEQ ID NO: 3407 - DNA, 60 bp, Homo Sapien
tatggaaattttgtctgaagatcagtggccatattactgtaggccctggttcatgttttc

SEQ ID NO: 3408 - DNA, 60 bp, Homo Sapien
aaagagaccgtctactccgccttcaatctgctcatgcattacccacccccctcgggagca

SEQ ID NO: 3409 - DNA, 60 bp, Homo Sapien
cttgtaaagttgccgagggtaggttcatctccaggtttcgggattcccatccgtcctggc

SEQ ID NO: 3410 - DNA, 60 bp, Homo Sapien
gggcaactctgtcaacgaaggcttgaaccaacctacggatgactcgtgctttgaccccta

SEQ ID NO: 3411 - DNA, 60 bp, Homo Sapien
ctgctgggccagcagcgtcgctttgacctgttcgacttctgttaccacctgctaaaagtg

SEQ ID NO: 3412 - DNA, 60 bp, Homo Sapien
gaaccagataaaactgtgaaaaaggttcaggataaattccgcttagacctgtcggatgaa

SEQ ID NO: 3413 - DNA, 60 bp, Homo Sapien
ctcattgaaactctttttgtggatttgatgaccttatggatattgccaaagtttaaggca

SEQ ID NO: 3414 - DNA, 60 bp, Homo Sapien
gctaaactgttctctgtataagttatggtatgcatgagctgtgtaaattttgtgaatatg

SEQ ID NO: 3415 - DNA, 60 bp, Homo Sapien
gtagcagcaatagtagtaatgctgttatacccagtgacgagacagtgttcaccccagtag

SEQ ID NO: 3416 - DNA, 60 bp, Homo Sapien
tcgaagcccgcccgtgttacaacgtggctcgcctaatgttcctcgatgcagagaggaaga

SEQ ID NO: 3417 - DNA, 60 bp, Homo Sapien
gcatacatccacagattcactttgtttatgcatatgtagatacaaggatgcacatataca

SEQ ID NO: 3418 - DNA, 60 bp, Homo Sapien
taatgattgacgtacttagcagctatctctcagtgaactgtgagggtaaaggctatactt

SEQ ID NO: 3419 - DNA, 60 bp, Homo Sapien
accgtgtagacacacgacatgcaagagttgcagcggctgctccaactcactgctcaccct

SEQ ID NO: 3420 - DNA, 60 bp, Homo Sapien
tttacattcatctggtttagacttaatatgccacaacgcaccacgaccttcccagggtga

SEQ ID NO: 3421 - DNA, 60 bp, Homo Sapien
tccgtgtaaccacatgcgcccaatgtccgtttgtctctcccgtgtgcgaaaaaacttgtg

SEQ ID NO: 3422 - DNA, 60 bp, Homo Sapien
ggctcattgaacgatggtggtaatatggcgctaaaacatacaccactgaaaacactacca

SEQ ID NO: 3423 - DNA, 60 bp, Homo Sapien
ctttcacctcaagaggttgcgacaagctactccaatacccctgctgggatagtgtcacag

SEQ ID NO: 3424 - DNA, 60 bp, Homo Sapien
aaaatgtcaatggtgtgtctggctggctgatgggatttcacctaattttaatgtggcttt

SEQ ID NO: 3425 - DNA, 60 bp, Homo Sapien
ggctgaaccttatggacagtactgctgatttagtgatctgaccttgaattaggggtttca

SEQ ID NO: 3426 - DNA, 60 bp, Homo Sapien
ccaccatcagtgtatgagactgcctgattccctgtacattcattcctgtggctgctctaa

SEQ ID NO: 3427 - DNA, 70 bp, Homo Sapien
atttcaccagatccatcctcactcctcgtatcaaggttgggcgagatgtggtacagaaagctcagacaaa

SEQ ID NO: 3428 - DNA, 70 bp, Homo Sapien
aatcgagtgagacaaaattttagtccaaataacaagtaccaaagttttatcaagtttgggtctgtgctgc

SEQ ID NO: 3429 - DNA, 70 bp, Homo Sapien
gctttggctaagatagatacttgtgaatcaaagatagcacagaaatgaactaagtatatcccatttggaa

SEQ ID NO: 3430 - DNA, 70 bp, Homo Sapien
tggttctgtttcttaatcacgtgcggcggtgtctaagtggtgttaccagtgtacgcgcagtgaccttgga

SEQ ID NO: 3431 - DNA, 70 bp, Homo Sapien
cctgggatggaggaactgagtttgcaaatcagctccatcttcatatcaaggaatagtaaaataagagaaa

SEQ ID NO: 3432 - DNA, 70 bp, Homo Sapien
ccctgttcttcaaagcttagctggtcatatttctacttgcttccttttagcttctgccttgcttgtttta

SEQ ID NO: 3433 - DNA, 70 bp, Homo Sapien
atatgctggactgcattcacacatggcatgaaataagtcaggttctttacaaatggtattttgatagata

SEQ ID NO: 3434 - DNA, 70 bp, Homo Sapien
ctctcctttcttcgaatgattcccatagaggatcactgtcagagctcgcctttcttctatctgccttata

SEQ ID NO: 3435 - DNA, 70 bp, Homo Sapien
aggttaacgttcgcactctgtgtatataacctcgacagtcttggcacctaacgtgctgtgcgtagctgct

SEQ ID NO: 3436 - DNA, 70 bp, Homo Sapien
aggcacccctagctcttgggatgtttgtatccaactccgggcaatgtggggctacaaaggcccctggctt

SEQ ID NO: 3437 - DNA, 70 bp, Homo Sapien
tgtataacatgataatgatgcctggtgtattgaaatcctcaataaatactgccaagtgtggatcagttgg

SEQ ID NO: 3438 - DNA, 70 bp, Homo Sapien
ccacagtggtttctctctagtcagtaacaaaatttcattatggtttcaggcattatatggtggtaaataa

SEQ ID NO: 3439 - DNA, 70 bp, Homo Sapien
gcacagttagatgcaatgtttatagaaattgattgttaaaccaaatttacactggcatgtgtggtgtagt

SEQ ID NO: 3440 - DNA, 70 bp, Homo Sapien
atgcctcatagtttacctcagcggagtggtggtttccgagattacgagaaagatgctcccatcactgtgt

SEQ ID NO: 3441 - DNA, 70 bp, Homo Sapien
cttcactccctttcttgaaaacctcctgtagttcctgttgtgtacgggataaaggtgcttaccatggggc

SEQ ID NO: 3442 - DNA, 70 bp, Homo Sapien
aggtataaaggtcccttacgatacctcgctgtcccgtcatcgtcaatatctaggacggcatagtgaccac

SEQ ID NO: 3443 - DNA, 70 bp, Homo Sapien
gttgaccgctcctccaactaaccagtggtatcacggaaaacttgacagaacgatagcagaagaacgcctc

SEQ ID NO: 3444 - DNA, 70 bp, Homo Sapien
aacttgggaatactggtctgcatcaagtttattcggtagtttgaccgctagtatgttggaagttatttgg

SEQ ID NO: 3445 - DNA, 70 bp, Homo Sapien
tgggatgccttactttgcacttaatttaataagggcattctcggaggagtagacgtttaatacgaagtgg

SEQ ID NO: 3446 - DNA, 70 bp, Homo Sapien
ttcctgagagcatgagggcccctagacagagtacaaggtgtaattcagacagccagccagaaaaagaatt

SEQ ID NO: 3447 - DNA, 70 bp, Homo Sapien
ggttgcaggttgtttaaccttatatgtacagtttcacatatgtataaaaacagtagtttgggggcctctt

SEQ ID NO: 3448 - DNA, 70 bp, Homo Sapien
ctcctgatttggatattgagggaccagaaggaaagttgaaaggctccaaatttaagatgcccaagttgaa

SEQ ID NO: 3449 - DNA, 70 bp, Homo Sapien
tcgttcgattgccagctccgttcagagtgaaccatgcagtggaatggtaagtggcattataagccccagt

SEQ ID NO: 3450 - DNA, 70 bp, Homo Sapien
cctcctgaccaccggggcttttcgtgagctcgtctctgatctcgcgcaagagtgacacacaggtgttcaa

SEQ ID NO: 3451 - DNA, 70 bp, Homo Sapien
atgtaaatagccgcacaaaggggtccaacagctctttgagtaggcatttggtagagcttgggggtgtgtg

SEQ ID NO: 3452 - DNA, 70 bp, Homo Sapien
caggtaccaatagatgggacgacctcggtaaacacatgattcctgctcggaattgcctaaccttccaaac

SEQ ID NO: 3453 - DNA, 70 bp, Homo Sapien
gacatcaagtgtaattagcttttggagagtgggctgacatcaagtgtaattagcttttggagagtgggtt

SEQ ID NO: 3454 - DNA, 70 bp, Homo Sapien
tctcatcgatttcaccaagcgtggactactcttccgaggccgcatctcagagcggctcaagacaaggggc

SEQ ID NO: 3455 - DNA, 70 bp, Homo Sapien
agagatgatcgtgcctataaatagtaggaccaatgttgtgattaacatcatcaggcttggaatgaattct

SEQ ID NO: 3456 - DNA, 70 bp, Homo Sapien
cacgggatgcatagcgtcgcacgcgatcgggtcgcgtctactaatgcttcgatatctatacgtcgcacac

SEQ ID NO: 3457 - DNA, 70 bp, Homo Sapien
ttctagccctctcgcagggcatcctgactgaactgtgtctaagggtcggtcggtttaccactggacgggt

SEQ ID NO: 3458 - DNA, 70 bp, Homo Sapien
ggatgaggttgagtcataccaaatagtgatttcgatagttcaaaatggtgaaattagcaattctacatga

SEQ ID NO: 3459 - DNA, 70 bp, Homo Sapien
aggaatcttcttcttggcagctgcagtctgtcaggatgagatatcagattaggttggataggtggggaaa

SEQ ID NO: 3460 - DNA, 70 bp, Homo Sapien
tagtgacagtattgacatctgagcatactccagtttactaatacagcagggtaactgggccagatgttct

SEQ ID NO: 3461 - DNA, 70 bp, Homo Sapien
ccccacggtcccgctttaaggtccataaatatccctaaggaaaaatccaccgtggtacattcagtcctct

SEQ ID NO: 3462 - DNA, 70 bp, Homo Sapien
gaagggataaaaagggggcatcaccgttcctgggtaacagagccaccttctgcgtcctgctgagctctgt

SEQ ID NO: 3463 - DNA, 70 bp, Homo Sapien
agaagacatacctgcccgctgtagatgagaaactcagggacttgtacagcaaaagcacagcagccatgag

SEQ ID NO: 3464 - DNA, 70 bp, Homo Sapien
tgcccgtcttcctgggagggaccaaaggcggccaggatataactgacttcaccatgcaatttgtgtcttc

SEQ ID NO: 3465 - DNA, 70 bp, Homo Sapien
ctaaaaccatcatagtacaggtaaggtgagggaatagtaagtggtgagaactactcagggaatgaaggtg

SEQ ID NO: 3466 - DNA, 70 bp, Homo Sapien
gtgctgtgttgaattacggaataatgagttagaactattaaaacagccaaaactccacagtcaatattag

SEQ ID NO: 3467 - DNA, 70 bp, Homo Sapien
tttctcttggagttacaagttatttcacttgagtccggagatgcaagtattcatgatacagtagaaaatc

SEQ ID NO: 3468 - DNA, 70 bp, Homo Sapien
gcaaagaggcactggcagaaaacaacctgaaccttccaaagatggctgaaaaagatggatgcttccaatc

SEQ ID NO: 3469 - DNA, 70 bp, Homo Sapien
acagccacctatgaggacatagtgacgctgcggacaggggaagtgaagtggtctgtaggtgagcacccag

SEQ ID NO: 3470 - DNA, 70 bp, Homo Sapien
aagtcctctgaagacaatgagaggatttaggatgagcccgataggtgtggcagaccaaatggacatttct

SEQ ID NO: 3471 - DNA, 70 bp, Homo Sapien
gaggtggctgatattctgcaacactgtacacataaaaaatacggtaaggatactttacatggttaaggta

SEQ ID NO: 3472 - DNA, 70 bp, Homo Sapien
aaatttcatctcaggcctccctcaaccccaccacttcttttataactagtcctttactaatccaacccat

SEQ ID NO: 3473 - DNA, 70 bp, Homo Sapien
catgacggcccggataacagcgacaatcgaacgctgaccgcttagaccttcgtgagtagctcggtgtcgt

SEQ ID NO: 3474 - DNA, 70 bp, Homo Sapien
tttgtcttgcccctaggaaggtgaatctgccctagcctggtttacggtttcttataactctcctttgctc

SEQ ID NO: 3475 - DNA, 70 bp, Homo Sapien
tccctggtgcctctcacttcgttggtgaccagtttcttaaactgaaagctttaatgttacatagtaaatg

SEQ ID NO: 3476 - DNA, 70 bp, Homo Sapien
aaagagaatataggcccgtggcagatacagaggttttctgcccttttggcctgcatgcccaacctttggg

SEQ ID NO: 3477 - DNA, 70 bp, Homo Sapien
agaaaatgccagaatcgattaaattcattaagcagaaacatggggctatccgctggtcaggggactttac

SEQ ID NO: 3478 - DNA, 70 bp, Homo Sapien
cctaccactgcagacgaatgtcagcgtcacataaaaagagcatgtaggatgggacatattgggatgtatt

SEQ ID NO: 3479 - DNA, 70 bp, Homo Sapien
atcctcaccaagcggctccgatacatggttttccgatccatgctcagacaggatgtgagttggtttgatg

SEQ ID NO: 3480 - DNA, 70 bp, Homo Sapien
atcagataggagcagtgacgaaagtaattttgatgtccctccacgagaaacagagccacggagagcagca

SEQ ID NO: 3481 - DNA, 70 bp, Homo Sapien
tcactggtgtcaagatgtatgagaaggcatatatatagtgaatttcacttcttaacttgttctcaagtgt

SEQ ID NO: 3482 - DNA, 70 bp, Homo Sapien
gacatgtatttcttacgtacactgtacttctgtgtgcaattgtaaacagaaattgcaatatggatgtttc

SEQ ID NO: 3483 - DNA, 70 bp, Homo Sapien
cgtgtatgtgttggtcatgagcatgctagtatgaataaggcaatgtgttaagcactggcatacaaatgca

SEQ ID NO: 3484 - DNA, 70 bp, Homo Sapien
attcggaagaacagaatggctctctttcaacaattgacatgtgtgcttcctatcctggataatcttttaa

SEQ ID NO: 3485 - DNA, 70 bp, Homo Sapien
aaacgaagttgaaaaagtcaagcccctgtgtactggggccggacttcccatcatttgagtgcagcacttt

SEQ ID NO: 3486 - DNA, 70 bp, Homo Sapien
tctgttaattcctggaactgtattttgaatccttaaaggtgagccctcatagggagatccaaagtcctgt

SEQ ID NO: 3487 - DNA, 70 bp, Homo Sapien
tccacattatcagttgacagtgtacaatgcctttgatgaactgttttgtaagtgctgctatatctatcca

SEQ ID NO: 3488 - DNA, 70 bp, Homo Sapien
ttgtcaccatcaggcaaggcacctgaattcccaccgcagagagtgttgtggccgtgaggacttttctgtc

SEQ ID NO: 3489 - DNA, 70 bp, Homo Sapien
ggcactcccaagggcgttggggtcataaggagactataactctacagattgtgaatatatttattttcaa

SEQ ID NO: 3490 - DNA, 70 bp, Homo Sapien
tatgtgagctgaaagactgctcttcactgaccggccgtgtcatagagcagcgcatcccctaccgtggcac

SEQ ID NO: 3491 - DNA, 70 bp, Homo Sapien
tgttgtgcgtgttatagatcttgttcccccccgcacctttcccgccgcgttttggcttcttccctctgtt

SEQ ID NO: 3492 - DNA, 70 bp, Homo Sapien
ggtagcagatggagtaatggtcacgaggtccagacccactcccaaagctcagacttgccaggctcccttt

SEQ ID NO: 3493 - DNA, 70 bp, Homo Sapien
tactcttaggtgccagtctggtaactgaactccctctggaggcaggcttgagggaggattcctcagggtt

SEQ ID NO: 3494 - DNA, 70 bp, Homo Sapien
aagttgctgatgggtagtacctgtactaaaccacctcagaaaggattttacagaaacgtgttaaaggttt

SEQ ID NO: 3495 - DNA, 70 bp, Homo Sapien
tccacagtcagccataataactcctcagacatgttatgctggggccgtgtcgatgtatcagtgccagcca

SEQ ID NO: 3496 - DNA, 70 bp, Homo Sapien
gatgtagttaaattgaacaataaccattggtgactggagcaggtaattatagcctgcagaaaaaattatc

SEQ ID NO: 3497 - DNA, 70 bp, Homo Sapien
tttttcacggaagttttcaatgatgggcgagcgtgcaccatccctttttgaagtgtaggcagacacaggg

SEQ ID NO: 3498 - DNA, 70 bp, Homo Sapien
gtctagagagggaggcaagccctgttgacacaggtctttcctaaggctgcaaggtttaggctggtggccc

SEQ ID NO: 3499 - DNA, 70 bp, Homo Sapien
aagaacaggcagaggtaaaaagatgatggaaggtgtggtgactaagggccacggttattgggtgaaattt

SEQ ID NO: 3500 - DNA, 70 bp, Homo Sapien
ttgttgccccgggccacagctcaagacgctggaaagtattattgtcaccgtggcaacctgaccatgtcat

SEQ ID NO: 3501 - DNA, 70 bp, Homo Sapien
ggctcagagccagtctttttggtgagggtaaccccaaacctccaaaactcctgcccctgttctcttccac

SEQ ID NO: 3502 - DNA, 70 bp, Homo Sapien
caaagaacaagcattagttttggctgtcatcaacttattatatgactaggtgcttgctttttttgtcagt

SEQ ID NO: 3503 - DNA, 70 bp, Homo Sapien
gttggaaaatgtgcaatatgtgatgtggcaaatctctattaggaaatattctgtaatcttcagacctaga

SEQ ID NO: 3504 - DNA, 70 bp, Homo Sapien
aattgtcctcacctaatccagtacctccttacgctttagtcagtcaaatcttgtatttcagcctgtgatg

SEQ ID NO: 3505 - DNA, 70 bp, Homo Sapien
tccccgttataaccgcaccgatacccgcctccgctaatcggatgaaacccctgcacactattgtcagtaa

SEQ ID NO: 3506 - DNA, 70 bp, Homo Sapien
ttattttatcatcgcgcgaccagctaaacactcctgcggtcgtatggtcgacaacaatcacacataaaat

SEQ ID NO: 3507 - DNA, 70 bp, Homo Sapien
ggtaagtattttagcatggctgtcaaggaaattcagagtaaagtcagtgtgattcacttaatgatataca

SEQ ID NO: 3508 - DNA, 70 bp, Homo Sapien
gtcgaagcgctgaaggaatagggcggctttccttccagcgagcatcattcggctgttaccaaaacaaaca

SEQ ID NO: 3509 - DNA, 70 bp, Homo Sapien
ataaaattcaacgtgaggaagcaagtgacaaggacgcccgaagcacagtggacggtcatgaaggagcggg

SEQ ID NO: 3510 - DNA, 70 bp, Homo Sapien
atggctctaaaagttttgccctttttaaggaggcactaaaaagagctgtcctggtatctagacccatctt

SEQ ID NO: 3511 - DNA, 70 bp, Homo Sapien
cttaaatgctgagatcctcatttatgtttgtagttggaaagcaaagctaggtagccatttcttctgttct

SEQ ID NO: 3512 - DNA, 70 bp, Homo Sapien
ctctgcaaaggctatccctccgaattctcaacatacctcaacttctgccgctccctgcggtttgacgaca

SEQ ID NO: 3513 - DNA, 70 bp, Homo Sapien
gacaaaagaaataccagatcaatctaaagagtcattcaggacctatccatgtgctgcttataaataaaga

SEQ ID NO: 3514 - DNA, 70 bp, Homo Sapien
ggctcgtggccggaacccgtttcttgcggaggaattttctcgccgtgcttcggtcagctacaaaattgtg

SEQ ID NO: 3515 - DNA, 70 bp, Homo Sapien
accaagcatgccagccacaccggctcctggattggccttcggaacttggacctgaagggggagtttatct

SEQ ID NO: 3516 - DNA, 70 bp, Homo Sapien
tttttaacatcgacggtcaaggcaaccacgtcccgccctactacggaaactcggtcagggccacggtgca

SEQ ID NO: 3517 - DNA, 70 bp, Homo Sapien
tcctggttcctttcttcctcgtttgttactttagagcaagtttgcccatagtcttgaatgcaatatttgt

SEQ ID NO: 3518 - DNA, 70 bp, Homo Sapien
cccatctgcagtgagtaggaagaggtcccctcaacagaggtgagaggttgggccaagtcaagtcagtttg

SEQ ID NO: 3519 - DNA, 70 bp, Homo Sapien
cttgattggtcacgatccccgcctacccaccaatccttaacgcgcctcaccggaccttaacattccaccc

SEQ ID NO: 3520 - DNA, 70 bp, Homo Sapien
agctaagggctcagaaaggatatgtgaggacgcagatgtctggtaatgaggtctcaagagctgttctgct

SEQ ID NO: 3521 - DNA, 70 bp, Homo Sapien
caaagacatgcctggggtaagccacccggctacctaattcctcagtaacctccatctaaaatctccaagg

SEQ ID NO: 3522 - DNA, 70 bp, Homo Sapien
gttgaacaaggccacgaatgtcgcccactggacaacccccagtctcaaatgcattagagaccctgccctg

SEQ ID NO: 3523 - DNA, 70 bp, Homo Sapien
tttgagttgcccatcttgtttcacactagtcacattcttgttttaagtgcctttagttttaacagttcac

SEQ ID NO: 3524 - DNA, 70 bp, Homo Sapien
ctgattgatggtgtccacactgactacattgtccccaacctgttttgagtagacacaccagctcctgttg

SEQ ID NO: 3525 - DNA, 70 bp, Homo Sapien
gttaatgccactgggcacctttcagacacactttggctgatccccatcacattcctgaccatcggctatg

SEQ ID NO: 3526 - DNA, 70 bp, Homo Sapien
catggaggccatcaactacatggcggcggatggagacttcaagattaagtgcgtggcctttgagtgaagc

SEQ ID NO: 3527 - DNA, 70 bp, Homo Sapien
atctattctctccaaaaatgcacccaactagctctatgtttacaaatggacataggactcaaagtttcag

SEQ ID NO: 3528 - DNA, 70 bp, Homo Sapien
ctcgcgcgtacatgttcgtgccagaacatgttacaccactcctacgatggcttgcccgattcgatgcccc

SEQ ID NO: 3529 - DNA, 70 bp, Homo Sapien
gactctactattaagtttgaaaatagttaccttcaaaggccaagagaattctatttgaagcatgctctgt

SEQ ID NO: 3530 - DNA, 70 bp, Homo Sapien
cagaaatgtcctgagcaatcacctatgaacttgtttcaaatgcatgatcaaatgcaacctcacaaccttg

SEQ ID NO: 3531 - DNA, 70 bp, Homo Sapien
tgaattcattctactcatactacacacccagttatggaatgtccagagttctcgaagaaaataaatgact

SEQ ID NO: 3532 - DNA, 70 bp, Homo Sapien
gagctgggcaaagtgccgacgcccacccaggttaagaatagacccaccagcatttcgtgggatggtcttg

SEQ ID NO: 3533 - DNA, 70 bp, Homo Sapien
gtatcaatgatgcaattactaggctcaacttgaaatcgacctatgatgtggagatgttgcgggatgccac

SEQ ID NO: 3534 - DNA, 70 bp, Homo Sapien
agcctgccatcaaggacatttcttaagacccaactggcatgagttggggtaatttcctattattttcatc

SEQ ID NO: 3535 - DNA, 70 bp, Homo Sapien
ccatcttaccaaggccaccacttgctgaaagcatcactaatgaattcagacaaagggtaccattttcagt

SEQ ID NO: 3536 - DNA, 70 bp, Homo Sapien
aggattcacggtgcacatgctggcattcaacatgtggaaagcttgtcttagagggcttttctttgtatgt

SEQ ID NO: 3537 - DNA, 70 bp, Homo Sapien
tgacaagcggatctctgtagacgaagctctgcgtcacccatacatcactgtttggtatgaccccgccgaa

SEQ ID NO: 3538 - DNA, 70 bp, Homo Sapien
aatgcttctgcttggccttatggaggagctgctccttccttacagccttggggatggacttgcccacacc

SEQ ID NO: 3539 - DNA, 70 bp, Homo Sapien
ccgttatgttgacattcttccttatgattataaccgtgttgaactctctgagataaacggagatgcaggg

SEQ ID NO: 3540 - DNA, 70 bp, Homo Sapien
gcgcaaggacggcacgcgcaaaggctacctgagcaagcggagttcggacaacacaaaatggcaaaccaag

SEQ ID NO: 3541 - DNA, 70 bp, Homo Sapien
gataagaccagcattgaggatgtagcagttgaaagctctgagtctaactctcttgtttctattccacctg

SEQ ID NO: 3542 - DNA, 70 bp, Homo Sapien
ataaaaaccagttccataacaatactgaggcattgtttcccctttttactacggtgaccatttgtattaa

SEQ ID NO: 3543 - DNA, 70 bp, Homo Sapien
tccgccgccactcataccaactatcggcaagaacgcaccgtttccgcacttcatttttaccccgcgcttc

SEQ ID NO: 3544 - DNA, 70 bp, Homo Sapien
tgggctaaatgtgccgtgggttccacgccgtgtgcgcaagttccctgtgtgaaagcacgtctgtcttcca

SEQ ID NO: 3545 - DNA, 70 bp, Homo Sapien
gcttttggggcaagctacggaacaggtgggcgcatgatgaactgcccaaagattctccggcagttgggaa

SEQ ID NO: 3546 - DNA, 70 bp, Homo Sapien
tgctactttgacatcgagtggcgtgaccggcgcatcacactgagggcgtccaatggcaagtttgtgacct

SEQ ID NO: 3547 - DNA, 70 bp, Homo Sapien
ggctgcaagaaatgtgttgctagttacccaacattacgccaagatcagtgatttcggactttccaaagca

SEQ ID NO: 3548 - DNA, 70 bp, Homo Sapien
cttgagaacttactaaaggcacttccttcctgttaaacccctgttaactctccataaatttggtgattct

SEQ ID NO: 3549 - DNA, 70 bp, Homo Sapien
tgcgtttgcagcctttgtgatcggagcactcctgacgggggccttgtggtacatctattctcacacaggg

SEQ ID NO: 3550 - DNA, 70 bp, Homo Sapien
cctaaggcttggaaccctttatacatcttggtcatcttgatctcataacgctggtataaggtggtctggt

SEQ ID NO: 3551 - DNA, 70 bp, Homo Sapien
gccccctctccaattcatgtgttgaagccctcgtctccatgtgatggtaattggtgttggggcctttgga

SEQ ID NO: 3552 - DNA, 70 bp, Homo Sapien
ttgggagagacttgttttggatgccccctaatccccttctcccctgcactgtaaaatgtgggattatggg

SEQ ID NO: 3553 - DNA, 70 bp, Homo Sapien
ctacagcgacctcaacacacagaggccgtattacaaatgagcccgaatcatgacagtcagcaacatgata

SEQ ID NO: 3554 - DNA, 70 bp, Homo Sapien
ggttaagattgctgtgagctttatcagataagagaccgagagaagtaagctgggtcttgttattccttgg

SEQ ID NO: 3555 - DNA, 70 bp, Homo Sapien
agaaaggatactaaatgaaacaacaggggagatacaatattatctggttgcactaatcctgtgctgctta

SEQ ID NO: 3556 - DNA, 70 bp, Homo Sapien
aaacgcctcttgtattgtcatgtacatagtccatacctgagtgctgtacataagttgttctgtgtataaa

SEQ ID NO: 3557 - DNA, 70 bp, Homo Sapien
aggttgggccactcacagctgcatgatgaggtagaggtggcccccactctcatagatgtcatccagggct

SEQ ID NO: 3558 - DNA, 70 bp, Homo Sapien
agggacaacatccttaagtcaaaagagagaagaggcaccactaaaagatcgcagtttgcctggtgcagtg

SEQ ID NO: 3559 - DNA, 70 bp, Homo Sapien
tgccagagatctgtggttattcgaacctttattactagtgacttcatgactggtatacctgcaacacctg

SEQ ID NO: 3560 - DNA, 70 bp, Homo Sapien
tttaatattccgagctagagctcttcttcctacgtttgtagtcagcacactgggaaaccgggccagcgtg

SEQ ID NO: 3561 - DNA, 70 bp, Homo Sapien
gatgtggatacctataaggagatttcatattttgttgcggagttcataatgaataacacaggagaatgga

SEQ ID NO: 3562 - DNA, 70 bp, Homo Sapien
tgtggttcagcgaatgggttggcttctccaataagttcggctttgggtatcaactgtccagccgccgtgt

SEQ ID NO: 3563 - DNA, 70 bp, Homo Sapien
tggtcgtgtctttatgagcaccatgtaagcctccttgtattgagataattgggcattaaacattaaactg

SEQ ID NO: 3564 - DNA, 70 bp, Homo Sapien
gggtgtgtgagtggttctgagcaaataactacagggtgcccattaccactcaagaagacacttcacgtat

SEQ ID NO: 3565 - DNA, 70 bp, Homo Sapien
tgacctttccccggagactttcttaagcaccatatagatacggttatgtttttaaagcctatgtgcctac

SEQ ID NO: 3566 - DNA, 70 bp, Homo Sapien
gtttcttcctgtgagttccattatttctatctcttatgggcaaagcattgtgggtaattggtgctggcta

SEQ ID NO: 3567 - DNA, 70 bp, Homo Sapien
ccaaacataggaagcggcaatcagcccgcgcgtggaaccgagacaagtaaacaagacgccagatctctga

SEQ ID NO: 3568 - DNA, 70 bp, Homo Sapien
ctttccatcttggcagccatcctttttaagagtaagttggttacttcaaaaagagcaaacactggggatc

SEQ ID NO: 3569 - DNA, 70 bp, Homo Sapien
agctggagacctagcacccagaagatgagaccgcaattcgagaatcaaagggccgggagcgatggtgagc

SEQ ID NO: 3570 - DNA, 70 bp, Homo Sapien
tttgggggagggttgttaaacagtaatagataagtgagacagattgcttgttatttatggtcaaatggtg

SEQ ID NO: 3571 - DNA, 70 bp, Homo Sapien
tgtcctttctaacacgtcgccttcaactgtaatcacaacatcctgactccgtcatttaataaagaaggaa

SEQ ID NO: 3572 - DNA, 70 bp, Homo Sapien
tgattggagattactctaaggccttcctcctacagacagtagacggaaagcaccaagacctcaagtacat

SEQ ID NO: 3573 - DNA, 70 bp, Homo Sapien
ttcggagacctcagtggtggctgtgagagctacctagtcaacctgtctctcaatgacaacgatggctcca

SEQ ID NO: 3574 - DNA, 70 bp, Homo Sapien
tccgagaacttgcccgggaagtcgatcctgcttatatcaagattgaggaggtcattgggacaggctcttt

SEQ ID NO: 3575 - DNA, 70 bp, Homo Sapien
acattgctgctcccatctttagaagcaatctaccatagttcaccctctggccacagtagttcacatcttt

SEQ ID NO: 3576 - DNA, 70 bp, Homo Sapien
acaaaagtgtacctgtaaatgtcctgaatccagcattgttgagctgtcatcaacattcttgtgtctgttt

SEQ ID NO: 3577 - DNA, 70 bp, Homo Sapien
ggcaggtgctcttgttttacccatgttgggtcagcctgaaactgccaaccagtaggaagcatggactctc

SEQ ID NO: 3578 - DNA, 70 bp, Homo Sapien
atcgatgagctagccaaaatctgtggcgttgaggacgcggtgtcagaaatgacacggcgagccatgggcg

SEQ ID NO: 3579 - DNA, 70 bp, Homo Sapien
tcctgaagctgagcaagactgtccttttaagcactatggctgtgctgtaacggataaacggaggaacctg

SEQ ID NO: 3580 - DNA, 70 bp, Homo Sapien
ggctgggaaaccctagaccatgtcagataggacaacactgctgggttttacatccagatagtaataaaca

SEQ ID NO: 3581 - DNA, 70 bp, Homo Sapien
ttgtccccgcgttcgagacactgcgctaccggctgtccttccccaagtcaaaagcggagttgctgtcaat

SEQ ID NO: 3582 - DNA, 70 bp, Homo Sapien
tgttggatggcacagatgtagcacatgtcatcgtcacagaagttccgtcagccagcactggagagcactt

SEQ ID NO: 3583 - DNA, 70 bp, Homo Sapien
ttgtttcgttctgggtcataaaactttgttaaggaactcttttggaataaagagcaggatgctgcaaagt

SEQ ID NO: 3584 - DNA, 70 bp, Homo Sapien
atttagatatgctaatcaaagcggcaacaagtgatctggaacactatgacaagactcgtcatgaagaatt

SEQ ID NO: 3585 - DNA, 70 bp, Homo Sapien
ccaagcggacagaggggccatgggttgtaggattgaggaacggaatctgccgactcacatgacagcccat

SEQ ID NO: 3586 - DNA, 70 bp, Homo Sapien
catagcacttagacaggactttcatgacccaatatggaacaatttgagtaccagaataggagattatggc

SEQ ID NO: 3587 - DNA, 70 bp, Homo Sapien
actcccccaagctgactcatcctaactaacagtcacgccgtgggatgtctctgtccacattaaactaaca

SEQ ID NO: 3588 - DNA, 70 bp, Homo Sapien
ttgggtacatgctgctaaaagcccgtcagctcgtcatccttgtttttgtcaacctggtatccagtaagta

SEQ ID NO: 3589 - DNA, 70 bp, Homo Sapien
cagaacactgtcttgaagacaatggcttactccaggagacccacaggtatgaccttctaggaagctccag

SEQ ID NO: 3590 - DNA, 70 bp, Homo Sapien
tatttggccagggccttttgaacagtagtgtccccatgaagtgctagataatatatgtgtaagagtcagc

SEQ ID NO: 3591 - DNA, 70 bp, Homo Sapien
aaaacaatttcaggctcgagtcattagtgtcatgctataccgtaattaccttcgaagcatgcgcagaaaa

SEQ ID NO: 3592 - DNA, 70 bp, Homo Sapien
ctcaaaggctctcactaccgtggaccacctagtctgtaactctttctgaggagctgttactgaatattaa

SEQ ID NO: 3593 - DNA, 70 bp, Homo Sapien
acttttcattccctgtagttgacaattctgcatgtactagtcctctagaaataggttaaactgaagcaac

SEQ ID NO: 3594 - DNA, 70 bp, Homo Sapien
gaatgtgaacttcgggcaagttaaatgggacagccttccatgttcatttgtctacctcttaactgaataa

SEQ ID NO: 3595 - DNA, 70 bp, Homo Sapien
acgcctttgccctgatccaaatgttagcacttgctagtgaacgtctacttatctcaagttctatgctaaa

SEQ ID NO: 3596 - DNA, 70 bp, Homo Sapien
ttcagtcccagctgtaggcttgtaaatacccgccccgccaaaccgcatagagaacgtggcagcaagctga

SEQ ID NO: 3597 - DNA, 70 bp, Homo Sapien
tgctttgaattggcaccgaaaagtgggaataccggggagttgagatctgtaattcatagtcacatcaagg

SEQ ID NO: 3598 - DNA, 70 bp, Homo Sapien
agcctgacatgcgacagcattgattctcttagccatcttaagggaatctacctcaatctggctgccaaca

SEQ ID NO: 3599 - DNA, 70 bp, Homo Sapien
gcgatatattctcgtccactcccccgctatccaacgtcacatctaagcactatgacatgcaccgaccgaa

SEQ ID NO: 3600 - DNA, 70 bp, Homo Sapien
ttccggacccactgcttcaactggcactcccccacgtacgagtatgcgttgagacatttgtacgtgctgg

SEQ ID NO: 3601 - DNA, 70 bp, Homo Sapien
atgcacaaatcgtcaaatctgaaaccatcttaacctcttccttagagtagctttctaattattctccatt

SEQ ID NO: 3602 - DNA, 70 bp, Homo Sapien
aataggaaaattcctatccagaggctggagagctacacaagaatcaccaacatccaatgtcccaaggaag

SEQ ID NO: 3603 - DNA, 70 bp, Homo Sapien
cacacctgaataaaattgatgtgcatgttttagggatcaattacctaactgttccttggtctatttatgt

SEQ ID NO: 3604 - DNA, 70 bp, Homo Sapien
tctgctgggctatgtaggcaggttaatcctccacttctcatgtggttgaaccagtgtgttttttggtaaa

SEQ ID NO: 3605 - DNA, 70 bp, Homo Sapien
gtcctagcaataacctcttgatccctactcaccgagtgttgagcccaaggggggatttgtagaacaagcc

SEQ ID NO: 3606 - DNA, 70 bp, Homo Sapien
acttggaggaccccccagacgaggttctcatcccgctgatcgttatacccgtcgttctgactgtcgccat

SEQ ID NO: 3607 - DNA, 70 bp, Homo Sapien
catcacaagaaaggtgaccgaagagctgacggagaccactgtgcttcggtgacagattcggctccagaga

SEQ ID NO: 3608 - DNA, 70 bp, Homo Sapien
cattatcaactagatactacacataccagcaccactactcacactacagcccactcaaaaacatcatcca

SEQ ID NO: 3609 - DNA, 70 bp, Homo Sapien
cctggatagtttgcggctgagaatgcacttactggctcattcagcgggtgccaaagcctttgtctgtgat

SEQ ID NO: 3610 - DNA, 70 bp, Homo Sapien
accccaacgattacaacacaacaccagcgcccaatatacgcgaatgaggcgccctatacccgcctctcca

SEQ ID NO: 3611 - DNA, 70 bp, Homo Sapien
ccaggatgtgcatgcatcttgaagcaacaaagcagccacagtttcagacaaatgttcagtgtgagtgagg

SEQ ID NO: 3612 - DNA, 70 bp, Homo Sapien
gtacaattagttgcttattacgtatgattactcacagcgatctattgttccatataaccaaaaagcatgg

SEQ ID NO: 3613 - DNA, 70 bp, Homo Sapien
tgctcagttaggtcagacctggggccagttgcccatttagcatctcaggcctcaggatcctcatttataa

SEQ ID NO: 3614 - DNA, 70 bp, Homo Sapien
ccaatagaatttcaacatgttctgtagcttagagtgctcacttactacctctgaacaatactcacgctgt

SEQ ID NO: 3615 - DNA, 70 bp, Homo Sapien
ggggatgatttacggcaagatatgctaacacttcaaattattcgtattatggaaaatatctggcaaaatc

SEQ ID NO: 3616 - DNA, 70 bp, Homo Sapien
cttttcctctgccttcggagggaaattgtaaatcctgtgtttcattacttgaatgtagttatctattgaa

SEQ ID NO: 3617 - DNA, 70 bp, Homo Sapien
cggatctcactcagccgcagacaagtaatcactaacccgttttattctattcctatctgtggatgtgtaa

SEQ ID NO: 3618 - DNA, 70 bp, Homo Sapien
gcagtacatcgtttgtacctgaaactgccgccacatgcactcctccaccgctgagagttgaatagctttt

SEQ ID NO: 3619 - DNA, 70 bp, Homo Sapien
gagcaaaacttgatagctttgcatagggaaagagggcattgatgctggggttttgaaaggtgagtaggag

SEQ ID NO: 3620 - DNA, 70 bp, Homo Sapien
gattcattacaattcaaatcgaagagttgtgaactgttatcccattgaaaagaccgagccttgtatgtat

SEQ ID NO: 3621 - DNA, 70 bp, Homo Sapien
taatgccaccgccacgagggaactggcttacgctgttggcacatttccttccagacggttctccacagat

SEQ ID NO: 3622 - DNA, 70 bp, Homo Sapien
actgtgggaaaactcgagagcgctcaggaattgtaggtagcaattactgtaaaggtggatttatggatta

SEQ ID NO: 3623 - DNA, 70 bp, Homo Sapien
ctgtgctgttacactaccaaactgtcagtgaacccgccgttattaaacgattgattagtgtcttaaacaa

SEQ ID NO: 3624 - DNA, 70 bp, Homo Sapien
gatgaataatgtcatgaatgctcaggctaaaaagagtcttgatcaggatccagttgtacgtgctcaggaa

SEQ ID NO: 3625 - DNA, 70 bp, Homo Sapien
atatgcaaagtcgatgagaatatgacccaaaggacactggtcaccaacgcagccatgcaagggataggat

SEQ ID NO: 3626 - DNA, 70 bp, Homo Sapien
tcttgtctgcaaacaggtccctgcctttttagaagcagcctcatggtctcatgcttaatcttgtctctct

SEQ ID NO: 3627 - DNA, 70 bp, Homo Sapien
aaaccaggagttcagctggctgcggcatgtgcttattgccgttggcctgctcacttgtatcaacctgctg

SEQ ID NO: 3628 - DNA, 70 bp, Homo Sapien
ccttgattagactcctagcacctggctagtttctaacatgttttgtgcagcacagtttttaataaatgct

SEQ ID NO: 3629 - DNA, 70 bp, Homo Sapien
aagaagtcgtttttagggagaacgggaattcagacaagctgcatttcagaaatgctgtcataatggtttt

SEQ ID NO: 3630 - DNA, 70 bp, Homo Sapien
aaagtgctgagattcattgcagaggttcagaaaagagaccctcgtgactggactgcacagttcatggagg

SEQ ID NO: 3631 - DNA, 70 bp, Homo Sapien
cccacccaagtgtctagcgggctcctcacactcaacatgtcctaaatgctgggtatcgcatgaagcactg

SEQ ID NO: 3632 - DNA, 70 bp, Homo Sapien
ctccacaggaccaaaccatagaacaatttcactgcaaacatgcatgattctccaagacaaaagaagagag

SEQ ID NO: 3633 - DNA, 70 bp, Homo Sapien
taactgcagtctacccctactgcccaacaggaagaaagtaagtacagtaatgtaaaggaagacttggagt

SEQ ID NO: 3634 - DNA, 70 bp, Homo Sapien
gtgattctgatatatgtacttgtcacattggtgttggacacatttgcgccaaaagtatggtaattctatt

SEQ ID NO: 3635 - DNA, 70 bp, Homo Sapien
tctgttccagcaaccctggttggggggtcagacttgatacactttcaggttgggagtggacccaccccag

SEQ ID NO: 3636 - DNA, 70 bp, Homo Sapien
tcgattcacccatcagcccatctccagcgctgtcccaattacagccctagcaagtggagacaacaagaag

SEQ ID NO: 3637 - DNA, 70 bp, Homo Sapien
ccccgaagtcttttgttcgcatggtcacacactgatgcttagatgttccagtaatctaatatggccacag

SEQ ID NO: 3638 - DNA, 70 bp, Homo Sapien
cttctgtgactccagtgactcagacgttagacctcttgatgttttcccactggtccctgaggctctgttc

SEQ ID NO: 3639 - DNA, 70 bp, Homo Sapien
cccagcttccagcggtactggaacagtggagaacccaacaatagcgggaatgaagactgtgcggaattta

SEQ ID NO: 3640 - DNA, 70 bp, Homo Sapien
tacaatgacttcagcttcgtgacgcacaccaatagagagggcgtccccatgcgtaagggcgagcacctgg

SEQ ID NO: 3641 - DNA, 70 bp, Homo Sapien
ttgtaagtgccatgtttattatctaatcattccaagttttgcattgatgtctgactgccactcctttctt

SEQ ID NO: 3642 - DNA, 70 bp, Homo Sapien
tctccatgggctgtgagactgtgtgaagccgtttgtgtggtctccatgtaggtgctgtgttcccggcacc

SEQ ID NO: 3643 - DNA, 70 bp, Homo Sapien
attgtcttagacactgtggttgcaaaacccacggaaagcctcatttgtgtggaaagtcagaggaaaaatg

SEQ ID NO: 3644 - DNA, 70 bp, Homo Sapien
tacatgctgctaaggtagtgaataaatcagtaatgcaatattgtgggtccaaactactctttgcactact

SEQ ID NO: 3645 - DNA, 70 bp, Homo Sapien
ataaaagccaagccacccatttgcttttaatccaaagaacatgtatagtttttgtacccagagactatga

SEQ ID NO: 3646 - DNA, 70 bp, Homo Sapien
ttccttatcctaatgatgcgcttttgtcccgtaaatgttaacactcatgaagcataccccggcctctcag

SEQ ID NO: 3647 - DNA, 70 bp, Homo Sapien
atgtaaagggttctagtagaaatagtgtcctaaggccaattacctaccatactaacaatcagcagataaa

SEQ ID NO: 3648 - DNA, 70 bp, Homo Sapien
cttcccataaggagaccaaattgggtgaacacgcctcgaggagacctcaggataacaggtcaacacctgt

SEQ ID NO: 3649 - DNA, 70 bp, Homo Sapien
aaaagtatctatagacacagacacttgcctatacagagacataaccacacacactcagaggatagtgaac

SEQ ID NO: 3650 - DNA, 70 bp, Homo Sapien
cagcatcctttcatcaacctacccaacctgtagctaagaatacctccatgagccctcgacagcgccgggc

SEQ ID NO: 3651 - DNA, 70 bp, Homo Sapien
accgttaagctgggcaaaggaaatgacaaggggacggggtctgtgagagtcaattcaggggaaagataca

SEQ ID NO: 3652 - DNA, 70 bp, Homo Sapien
ttagctccccggggtcattgggtcgccacctcttaatccactcggaggaccagcgatctaactgtgctgt

SEQ ID NO: 3653 - DNA, 70 bp, Homo Sapien
gaagctgttaaagatttatgccagagccttgcaggatggagcacctctgggacaactaagagccaaggcc

SEQ ID NO: 3654 - DNA, 70 bp, Homo Sapien
tgctttcagggtgaagcaagcttgaatttggattgcctgctttctttaaagcgaattcatactataacag

SEQ ID NO: 3655 - DNA, 70 bp, Homo Sapien
cctgggtgaaaatcaggaaccgcacacagccacatcttcctagacctaagagtaaattatggaggatttt

SEQ ID NO: 3656 - DNA, 70 bp, Homo Sapien
ggatactttgaacattagaaggccgctagtaaaaatggtttataaaggccatcgcaactccaggacaatg

SEQ ID NO: 3657 - DNA, 70 bp, Homo Sapien
cttaagcaaatcatgcttctctgtttcacgtagttgggttgacaagtttctgcctttaagataaatgagt

SEQ ID NO: 3658 - DNA, 70 bp, Homo Sapien
tgaactacactgttcagataaggtcacaatctgatgctgtcagtttgaccgagctggttttgcttatggt

SEQ ID NO: 3659 - DNA, 70 bp, Homo Sapien
aaaggatcccaaacttgtaactaaattctgacatatctgttactgctgactcacattcattctccgccat

SEQ ID NO: 3660 - DNA, 70 bp, Homo Sapien
acttggccccatgaacggtccatgccgataagtaaacgtcgaacaattgcccttcaaccactccctctaa

SEQ ID NO: 3661 - DNA, 70 bp, Homo Sapien
accaagaatgtctataatgcatcatcacacagtacctcaggttttgcaagcacattccgggaagataact

SEQ ID NO: 3662 - DNA, 70 bp, Homo Sapien
catagctgcttgtaggtgccacctcttaaggccattaccatagcaattaatactgaacatgagctttgga

SEQ ID NO: 3663 - DNA, 70 bp, Homo Sapien
gtggcacattcttagagttaccacaccccatgagggaagctctaaatagccaacacccatctgttttttg

SEQ ID NO: 3664 - DNA, 70 bp, Homo Sapien
cgcctggctgcccttaaccatcgagataaaggataggttacagttacgggtgctcttgcgtcgggaagac

SEQ ID NO: 3665 - DNA, 70 bp, Homo Sapien
ggaaagggtatttggtttcccagtccactatactgacgtctccaacatgagccgcttggcgaggcagaga

SEQ ID NO: 3666 - DNA, 70 bp, Homo Sapien
cttaaacttaatgctgtcaagtgttagatgtgtgcatgtgaacttgttgcactgcagaaacatattcaga

SEQ ID NO: 3667 - DNA, 70 bp, Homo Sapien
tcagtgataaaggtaccacaccgcttcagctcgccattatccgagagaggtcaagctgtgtgaaaatcct

SEQ ID NO: 3668 - DNA, 70 bp, Homo Sapien
ctgtgccggctgtggaactccagtagagcctagtaagtacggataatggatcgcctgcttatgatgtgat

SEQ ID NO: 3669 - DNA, 70 bp, Homo Sapien
aggccacagatgtgagtaagcgagacacaacacttgtcctcttggaggttacattcttgctggggggagg

SEQ ID NO: 3670 - DNA, 70 bp, Homo Sapien
aaactggaagagagttacactctcaactccgacctcgcccgcctaggtgtgcaggatctctttaacagta

SEQ ID NO: 3671 - DNA, 70 bp, Homo Sapien
cagacactgtgcaaataaattatttctgctaccttctcttaagcaatcagtgtgtaaagatttgagggaa

SEQ ID NO: 3672 - DNA, 70 bp, Homo Sapien
tcatccacgtgcacttgtgcggcatctgcagtttacaggaacggctccttccctaaaatgagaagtccaa

SEQ ID NO: 3673 - DNA, 70 bp, Homo Sapien
taactctcccttcatatcttttcacctatttccagtccttatcatagttgataaaaacctcagactcatc

SEQ ID NO: 3674 - DNA, 70 bp, Homo Sapien
ccattcaatgtttgatgcataattggaccttgaatcgataagtgtaaatacagcttttgatctgtaatgc

SEQ ID NO: 3675 - DNA, 70 bp, Homo Sapien
gtatgacatttcacgggagatttcttgttgctcaaaaaatgagctcgcatttgtcaatgacagtttcttt

SEQ ID NO: 3676 - DNA, 70 bp, Homo Sapien
ctcctctcttcatattgtccgttttccggtattgagttagggaaagtatgcaggtattcctgtcattcct

SEQ ID NO: 3677 - DNA, 70 bp, Homo Sapien
ttccaaagtcagtaattgtgttaaccacgtgtataacagctctgctggacacccaagaaagccatgggaa

SEQ ID NO: 3678 - DNA, 70 bp, Homo Sapien
cctaactggggctttcttgacatgtaggttgcttggtaataacctttttgtatatcacaatttgggtgaa

SEQ ID NO: 3679 - DNA, 70 bp, Homo Sapien
cccctggaggcactgaagtgcttagtgtacttggagtattggggtctgaccccaaacaccttccagctcc

SEQ ID NO: 3680 - DNA, 70 bp, Homo Sapien
cagacgagacccaagggcagagcatttaagagtgaagtcatgacctccagggagcctagaagctggtggc

SEQ ID NO: 3681 - DNA, 70 bp, Homo Sapien
acctcaaagctctcccgtggggcgattctcttgttgttccgatagtgtctcgcgggcgaaaccaccagca

SEQ ID NO: 3682 - DNA, 70 bp, Homo Sapien
ggataccaaacaattgatgattattatactgatgccagtccgagtcctagactgaagtcagtaggaattc

SEQ ID NO: 3683 - DNA, 70 bp, Homo Sapien
tcataacccagcccccccggcaagttgatacttgatcatgaagtcccccaaaaataccaaatacttttat

SEQ ID NO: 3684 - DNA, 70 bp, Homo Sapien
tgagtatgtcacttacccgtgcttctgtttactgtgtaattaaaatgggtagtactgtttacctaactac

SEQ ID NO: 3685 - DNA, 70 bp, Homo Sapien
gtaatttatataatccctgaaacgggcttcaggtcaaacccttaagacatctgaagctgcaacctggcct

SEQ ID NO: 3686 - DNA, 70 bp, Homo Sapien
ttaaccccagatgcctgctatcctgactaatttaagtcattgctgactgcatagctctttttcttgagag

SEQ ID NO: 3687 - DNA, 70 bp, Homo Sapien
ctcctctgccctagagctgtttgttcaatcactgatgggcaaaggggagatgtagctaactggtggccct

SEQ ID NO: 3688 - DNA, 70 bp, Homo Sapien
tactcttcagcagagttccctgatggccttgtacagagaacccgatgattgatgagggtatagcacagct

SEQ ID NO: 3689 - DNA, 70 bp, Homo Sapien
tgagccttgggctaatctggctgagtagtcagttataaaagcataattgctttatattttggatcatttt

SEQ ID NO: 3690 - DNA, 70 bp, Homo Sapien
aggttgttcatggtgtatattacatggttaacatcaaaaggctgctaataggcacctcttcaatattaat

SEQ ID NO: 3691 - DNA, 70 bp, Homo Sapien
aatgcaggaggcagcgtgatgatacaacgtgttaatggttcattagcagtatctcgtgctctgggggact

SEQ ID NO: 3692 - DNA, 70 bp, Homo Sapien
ctttatcccaccattagagagagaaatgcgatgatgttcaataatgatttgatggcagatgtacattttg

SEQ ID NO: 3693 - DNA, 70 bp, Homo Sapien
tttattgaacaagttagaggcataagcttaagagcatttccatgaaacaacacatgcagcattccaggaa

SEQ ID NO: 3694 - DNA, 70 bp, Homo Sapien
ctgaagcagtctgcaactgatccccggactggcatcgtggacatatctattcttactacggggatgagtg

SEQ ID NO: 3695 - DNA, 70 bp, Homo Sapien
gagctcaatgtctggcaggtcaatgcttcccggacacggatcacttttgtctgattccagcctgcttgca

SEQ ID NO: 3696 - DNA, 70 bp, Homo Sapien
catacatggaaccatacatcatctatgctttgtagtatgactcctgtcactcagtacaattattttgaga

SEQ ID NO: 3697 - DNA, 70 bp, Homo Sapien
accgctgacatctcgcttgccaaacgctcggtattaaacaatcccagtaagcacgcaataatagaaagat

SEQ ID NO: 3698 - DNA, 70 bp, Homo Sapien
tgtggataaagaccccagataaagatgcctgtgttgctcaactcttgtaaatactcttgagacattttga

SEQ ID NO: 3699 - DNA, 70 bp, Homo Sapien
atacagtggcataaacgatgctcttcctagtagcttaataggccacaagctagtttctgttgcactctga

SEQ ID NO: 3700 - DNA, 70 bp, Homo Sapien
tggacccaggtcgtctgacttctcgtgccattttcaatgaaaccaagaaccccactttgactcgaagaaa

SEQ ID NO: 3701 - DNA, 70 bp, Homo Sapien
gtctttgtgggttgctctactatggagatcaacagttactgtgactgagtcggcccattctgtttagaaa

SEQ ID NO: 3702 - DNA, 70 bp, Homo Sapien
cacccatagcatgttaaccctgccgcgtggaatccccccgggaatcgaaattccgaacccaatgcagtcc

SEQ ID NO: 3703 - DNA, 70 bp, Homo Sapien
gtaacatactcatcaactatgatagacttaacacttgttacctaatgaacaaggaggatgtgcatttcgg

SEQ ID NO: 3704 - DNA, 70 bp, Homo Sapien
aaaatctgaaagaaacgtctttagtggctttaagccccaaaacgtccctaaggcgtcctcgagatgaaga

SEQ ID NO: 3705 - DNA, 70 bp, Homo Sapien
agtgaaacctgaggattcctcgttgaagcaggtattcatccatggggttcttccgcggtgaagccagctt

SEQ ID NO: 3706 - DNA, 70 bp, Homo Sapien
gcttcacacaacacgtctaccataagtatcgtaggcgctgccttaatgagcggaaacgcttgggcattgg

SEQ ID NO: 3707 - DNA, 70 bp, Homo Sapien
ctaactgtttattgttggtatgtagaaatatatctgatttgcatactggtcctttatccagcaaccttct

SEQ ID NO: 3708 - DNA, 70 bp, Homo Sapien
tttgcatgactgatagctgtaactcacagttaacatgctttcagtcaagtacagattgtgtccactggaa

SEQ ID NO: 3709 - DNA, 70 bp, Homo Sapien
gcagagactcaccgcactgtgttaaaccagatcctacggcagtccacgacccaccttgctgatgggcctt

SEQ ID NO: 3710 - DNA, 70 bp, Homo Sapien
catttcagaatagccatatcaggaaaataatgtcgagatatgtacttcttgcctttaagttttaacagcc

SEQ ID NO: 3711 - DNA, 70 bp, Homo Sapien
caggaaattactgcccacttgtcaagttcagcccaccatctgtttgaagattatatgaagtttaaattct

SEQ ID NO: 3712 - DNA, 70 bp, Homo Sapien
ttggctggtagagccttctagaggttcagaatattagcttcaggatcagctgggggtatggaattggctg

SEQ ID NO: 3713 - DNA, 70 bp, Homo Sapien
tcatcctgtgtataattgtagactgtaccaagaagcaactaccttagctccactgccctttgagggatgg

SEQ ID NO: 3714 - DNA, 70 bp, Homo Sapien
aggtatagtggatgctatttatgatccaagtttttacatcacatccattgatctgcctatcccttctttt

SEQ ID NO: 3715 - DNA, 70 bp, Homo Sapien
gaacataagctgcaaaatgtgcacccatattttaagctgctttttcaggggataaatagtgtttggggac

SEQ ID NO: 3716 - DNA, 70 bp, Homo Sapien
agggtggggtaagggatttcttaggggatggtagacctttattgggtatcaagacatagcatccaagtgg

SEQ ID NO: 3717 - DNA, 70 bp, Homo Sapien
gtggatctattcaaagcttaacttctgtaggttccaaggagacacccaaagcttcaccaaacccagacct

SEQ ID NO: 3718 - DNA, 70 bp, Homo Sapien
ggatcccaccctaccacgactacagggtctactgcaatctatcggcggcacacacgttcgaggacctgaa

SEQ ID NO: 3719 - DNA, 70 bp, Homo Sapien
tctttgtattggagatatttctgtaactcattctcttggtgctcacgattgccatggccatagggccaca

SEQ ID NO: 3720 - DNA, 70 bp, Homo Sapien
gcacaactgattgatgagcggacaaagcttggagactatgccaacctaaaacaattctaccgagaccttg

SEQ ID NO: 3721 - DNA, 70 bp, Homo Sapien
ttcatcttttgcatccaacaggcagaatatgatctgtgtccaaaagtgaacttgagtcaggaatgaatca

SEQ ID NO: 3722 - DNA, 70 bp, Homo Sapien
acagatacaaactatttctatcctgagtagtaatctcacacttcatcctatagagtcaaccaccacagat

SEQ ID NO: 3723 - DNA, 70 bp, Homo Sapien
ggggaaagtgagtcaatacctgttagtgttaggctattaacaatagttaggtgaaaggtaatgagggcat

SEQ ID NO: 3724 - DNA, 70 bp, Homo Sapien
gacctgcaattactacgcaaacgcttacagcttttggctcgccaccatagagaggagcgagatgttcaag

SEQ ID NO: 3725 - DNA, 70 bp, Homo Sapien
tgaacttgaaaccttttattccgggcgtcttggtagtttctggtgggattcagtgggtgagagggaagaa

SEQ ID NO: 3726 - DNA, 70 bp, Homo Sapien
gctgtattcatttctccaatctcatgtccattttggtgtgggagtcggggtagggggtactcttgtcaaa

SEQ ID NO: 3727 - DNA, 70 bp, Homo Sapien
agacagagaggcacctgggtcagtattagtctatttatcagaggtgtaaataatctatgtatagtttttc

SEQ ID NO: 3728 - DNA, 70 bp, Homo Sapien
tacagaaaacggtgccatccctgaacacggctggccactgggtatactgctgacaaccgcaacaacaaaa

SEQ ID NO: 3729 - DNA, 70 bp, Homo Sapien
ttataaaccagagaaaggcagcaaatatgtctatctttttaaatattcatgataatggaccaggcacggt

SEQ ID NO: 3730 - DNA, 70 bp, Homo Sapien
atggagcaaaacagtctttgaatatcgaacacgcaaggctgtgagactacctattgtagatattgcaccc

SEQ ID NO: 3731 - DNA, 70 bp, Homo Sapien
acatagggacctacacacagaggagtgaacttagggttctagggactatggccgggtcaccggtggccag

SEQ ID NO: 3732 - DNA, 70 bp, Homo Sapien
aaagatgccggaagccccaaaaagcccaccctagtgagtctgcctctaggacccgaagttctctccccag

SEQ ID NO: 3733 - DNA, 70 bp, Homo Sapien
gaagcctttactagcagcttcaacccagtcctccttaccttgcacctattaacgttggttcaacatgaag

SEQ ID NO: 3734 - DNA, 70 bp, Homo Sapien
ctttagttttcgacattatttttaggttttaagagtggcaacttaggattttagggtgatggctttggaa

SEQ ID NO: 3735 - DNA, 70 bp, Homo Sapien
ttggactggtggcatcatgtaactgctaaccttacagtaaaaacccaagaatgggtcaaaaatgtcttcc

SEQ ID NO: 3736 - DNA, 70 bp, Homo Sapien
cagagtcagcatgctaattcactctagttcaaatccacattctagttgaatccctgcaatgtaacttgac

SEQ ID NO: 3737 - DNA, 70 bp, Homo Sapien
gatcaggtttagacaatgagctttggttgtgttcttgttagtcctaatattggttttcagtttggaatta

SEQ ID NO: 3738 - DNA, 70 bp, Homo Sapien
caagaagaatcatgatgagggatgggatgaaggcagcaaggggtaaccatcttgaccttctgttttttct

SEQ ID NO: 3739 - DNA, 70 bp, Homo Sapien
ccctgcggtattgttttccctctgttgtatgtatagatatatgctacttgtcaattttccaattttgaaa

SEQ ID NO: 3740 - DNA, 70 bp, Homo Sapien
gacctgtagtggcatgagagtgtataacatttcctaagatgacaggcaaagtagaactaaccctggcact

SEQ ID NO: 3741 - DNA, 70 bp, Homo Sapien
ccagagagagttgcgcagcttcaagacattgcccgtcagaagcttttaggtttgttctgtcagtcaaaac

SEQ ID NO: 3742 - DNA, 70 bp, Homo Sapien
atgtgaccttaaagtgtactgcaaagctgtaactttaagtaattgctgttctgccactgcttactctgaa

SEQ ID NO: 3743 - DNA, 70 bp, Homo Sapien
gcggtcagtttccaccatgaatctttcgaaatatgttgatcccgtcattagcaagcggctctcctcttca

SEQ ID NO: 3744 - DNA, 70 bp, Homo Sapien
acagctcgtccttgggagagaaaaagctcccacagtatgtggcgtctgaggggtaacagcattatatttc

SEQ ID NO: 3745 - DNA, 70 bp, Homo Sapien
tcccacctgcaactgctgaataatacactcagtttgtcttctagtactcagctcagtttgatctagatat

SEQ ID NO: 3746 - DNA, 70 bp, Homo Sapien
gagcaccttgcagacgtgatcttgcttcgtcctgcagcactgtgcggggcaggaaaatccaagaggaaga

SEQ ID NO: 3747 - DNA, 70 bp, Homo Sapien
tcattactctccacccccttactctgctataatttctccttaataggacactgtataacttattttctta

SEQ ID NO: 3748 - DNA, 70 bp, Homo Sapien
ggttgtgggtgaccagttgcacttggcctctggattgtgggaattaaggaagtgattcatcctcttgaag

SEQ ID NO: 3749 - DNA, 70 bp, Homo Sapien
tggctgaagtcacctcttggttacagtagcgtagcgtggccgtgtgcatgtcctttgcgcctgtgaccac

SEQ ID NO: 3750 - DNA, 70 bp, Homo Sapien
cattttcttagacgtttgctccaccagatttaaccaaatgtaactcccacattgagtttatctatattga

SEQ ID NO: 3751 - DNA, 70 bp, Homo Sapien
gtccattggacctaaactacacgcagactgagcatagacagagcgcagacaatcacaaagcagaaaagca

SEQ ID NO: 3752 - DNA, 70 bp, Homo Sapien
caagtgcaaagttcacacctgatttttaagacttagaataaggaggtggggaatgtgaaatatctcattt

SEQ ID NO: 3753 - DNA, 70 bp, Homo Sapien
aaggaaaaacaaataagcgagaaccgcgacgagcaccacataagccgtaggaccgcatgaaagaagagac

SEQ ID NO: 3754 - DNA, 70 bp, Homo Sapien
ttcaaagagaattgtggcagatgttgtgtgtgaactgttgtttctttgccacatgtgttgtatttgaaag

SEQ ID NO: 3755 - DNA, 70 bp, Homo Sapien
accaggaaccaccttggcaagatatttacccaccggccatctctgtttactcatgaatgttaaatgttaa

SEQ ID NO: 3756 - DNA, 70 bp, Homo Sapien
gggagagctcacttactcttcaacttaatggcagactgtgatcgctaactgcatctggcacaaaaacatg

SEQ ID NO: 3757 - DNA, 70 bp, Homo Sapien
tcatcatcaccgcaactctgacgtttcctacaagaagttagagacttaagcagtattggcatcggatgga

SEQ ID NO: 3758 - DNA, 70 bp, Homo Sapien
gaattttacaagctggttaattgatgtcttgttagtagcttgaaattggctgtggtgggagtgtttgcac

SEQ ID NO: 3759 - DNA, 70 bp, Homo Sapien
gacacagtatcatgaaagtcctatttcagtaagacccatttacatacagtagatttttagcagagatctt

SEQ ID NO: 3760 - DNA, 70 bp, Homo Sapien
gctggaatggtggtaagtgaactgaaaattccagtcactcttgggctagactcaacgttcttaaaaacta

SEQ ID NO: 3761 - DNA, 70 bp, Homo Sapien
gggaaaagatattaacatcacgtctttgtctctagtgcagtttttcgagatattccgtagtacatattta

SEQ ID NO: 3762 - DNA, 70 bp, Homo Sapien
tctgggaacaccaagcaccctgaatcgagactgcaggagccctgcggggtgagactgtgtcagagataca

SEQ ID NO: 3763 - DNA, 70 bp, Homo Sapien
tattcaaggcttaactgaaaccggtactgatttggaagcagtagctaagtttcttgatgcttctggagca

SEQ ID NO: 3764 - DNA, 70 bp, Homo Sapien
gtggcatcctacttacgtacgtggcataacacatcgtgtgagcccatgtatgctggggtagagcaagtag

SEQ ID NO: 3765 - DNA, 70 bp, Homo Sapien
caaaattacactatccacctggtacctaagtcttgtcatggacttacaggtttgcatgggttccaaatac

SEQ ID NO: 3766 - DNA, 70 bp, Homo Sapien
gggcctgggtgagttctgtttgctccttgtaccaccatccaaatggtgttatcaaatctcttagattcca

SEQ ID NO: 3767 - DNA, 70 bp, Homo Sapien
ggggctttctttttagttctctagggtctgataggaacagacctgaggcttatctttgcacatgttaaag

SEQ ID NO: 3768 - DNA, 70 bp, Homo Sapien
tgtggagatttaagagtggcttgggatgctgtgtcccaaggaatttcttttcacctcttggaagggctgg

SEQ ID NO: 3769 - DNA, 70 bp, Homo Sapien
tacatctcaggtttcatttcacaatgcacgcatggagttggaaggagttcaacagacagacagtttttct

SEQ ID NO: 3770 - DNA, 70 bp, Homo Sapien
gggaggggttgggagtgttagtaatcaaggtttagaacaccatgagatagttacccctgatctccagtcc

SEQ ID NO: 3771 - DNA, 70 bp, Homo Sapien
actggaaccgacatgctgggagattacatcttctctatggcaagcgtgacttcttgctgagtgacaaagc

SEQ ID NO: 3772 - DNA, 70 bp, Homo Sapien
ttccacaaagtgctggcacttacacccacaacccggaaggctgtggaccgattcctctagggtggtgacc

SEQ ID NO: 3773 - DNA, 70 bp, Homo Sapien
caggactttgatctcttctgttgccctcgctaggttctccctggtgggttagtgctttgtatctgtctct

SEQ ID NO: 3774 - DNA, 70 bp, Homo Sapien
aagcattattagacttgaaagggtttgataatctcccagtccttagtaaagattgagagaggctggagca

SEQ ID NO: 3775 - DNA, 70 bp, Homo Sapien
caactatctaaaacctaattgcaaattgaccacagacctctaacctcctacttttatagacttgaatact

SEQ ID NO: 3776 - DNA, 70 bp, Homo Sapien
aaggatttgacccaaatcagctaagtgtagccacattactgtttgagggggatcgtgagaaggttcttca

SEQ ID NO: 3777 - DNA, 70 bp, Homo Sapien
gcttcttgtcacctaacaaaggcgtaggagtaacctcgcactttgctagctaacctgactccgggtgagg

SEQ ID NO: 3778 - DNA, 70 bp, Homo Sapien
agactgtagctcagtattcgggagtaccttggtggatcatcctagtggctattctcgctgggatcttgat

SEQ ID NO: 3779 - DNA, 70 bp, Homo Sapien
tgactggactaatgtaaggcagatgacgtgatctttaagactgctatatatatcagtctcttactctata

SEQ ID NO: 3780 - DNA, 70 bp, Homo Sapien
cagatgtgaattctcaaaagttagccattgctgcaatctctgctgttgcctcctgttctgaaaaaattaa

SEQ ID NO: 3781 - DNA, 70 bp, Homo Sapien
gatgtaagccttaagccttcgcagtttccacgtggcattgagcgttcgagtgcacagaactagaagtcaa

SEQ ID NO: 3782 - DNA, 70 bp, Homo Sapien
cccctttccgaatttcaaggaccaaggtgacccgacctgtgtatgagagtgccaaatggtgtttggcttt

SEQ ID NO: 3783 - DNA, 70 bp, Homo Sapien
caaggaaaaggatcatataaacatgaccgagttgtacctcagagtcgagcttctgcacaaataataagtt

SEQ ID NO: 3784 - DNA, 70 bp, Homo Sapien
tggcactgctaaaatagaatatagcatctttcatatggtaggaaccaacaaggaaactttcctttaactc

SEQ ID NO: 3785 - DNA, 70 bp, Homo Sapien
tcaccatcaagcccctggacagaaaactcattctcgacagcgctcgtgccaccaagggcaggatcctcac

SEQ ID NO: 3786 - DNA, 70 bp, Homo Sapien
gtacctgcctaatccacccggcgtgactcatttcaacactaagtactaggggtgttgtcaggagacaaat

SEQ ID NO: 3787 - DNA, 70 bp, Homo Sapien
cacttacatcatagataaattttagcttcccagtaactgagggatttgtttcctaacgccattggaggcc

SEQ ID NO: 3788 - DNA, 70 bp, Homo Sapien
gtgctggtgaaaaggtagggctgagtgattaccttagccacagggtggctgagcaggaactttagaagaa

SEQ ID NO: 3789 - DNA, 70 bp, Homo Sapien
ggaatggttaaacacaaaaggctgatagctggtatcacatagttggagtcagtgcataattccaagtggc

SEQ ID NO: 3790 - DNA, 70 bp, Homo Sapien
aagaaggctttgcggatccccggagaccttcgggtagcaactgtcaccttgatgctggcgatgctgagct

SEQ ID NO: 3791 - DNA, 70 bp, Homo Sapien
gggaggtagctaattctcctctgtagctcttgcaatcccgttgattctaacatcaggcttctgagagttc

SEQ ID NO: 3792 - DNA, 70 bp, Homo Sapien
tcctcgttttgaatataagattcccaaacagaggagcataacacattcctagtacctaagttccaggtgg

SEQ ID NO: 3793 - DNA, 70 bp, Homo Sapien
atgccatggactttatcaacgacgccaccgacgtcaacgatgccctgggctatgtgacccgcttctaccg

SEQ ID NO: 3794 - DNA, 70 bp, Homo Sapien
gggaagtcatctgtaactaaaggtggtccacaaattgcttatgaacgcggctttaggtggaagcttgctc

SEQ ID NO: 3795 - DNA, 70 bp, Homo Sapien
gtcgagtttgccatcagccgggtccagatgaatttcctgcacctgctaagctccgaggtgacccagcaca

SEQ ID NO: 3796 - DNA, 70 bp, Homo Sapien
atagacgtgtcatgtagtggggtgtaatcggtatatgaacggtagggtagatggtattagattctaattt

SEQ ID NO: 3797 - DNA, 70 bp, Homo Sapien
cttttgtaactggtgttcactgacaccttgatggctcttgatggctctaaaaagttgtaggattttttgt

SEQ ID NO: 3798 - DNA, 70 bp, Homo Sapien
caaaatctatcagatttatgaaggtacttcacaaattcaaagacttattgtagcccgtgaacacattgac

SEQ ID NO: 3799 - DNA, 70 bp, Homo Sapien
cctacacccttggacttgaggattttgagtatctcggacctttcagctgtgaacatggactcttccccca

SEQ ID NO: 3800 - DNA, 70 bp, Homo Sapien
agcctaatttattggattccctattcgtagccatctccgtggccaatgtgactaccgtgccagcagcggg

SEQ ID NO: 3801 - DNA, 70 bp, Homo Sapien
atgctctcaatcatggagaaattggaattcttcgatttttcttatgaccttaacctgtgtgggctgacag

SEQ ID NO: 3802 - DNA, 70 bp, Homo Sapien
tccttgatattgcacctttggacatcggtggtgctgaccatgaattctttgtggacattggcccagtctg

SEQ ID NO: 3803 - DNA, 70 bp, Homo Sapien
aaacacacctctgaggccagcggccagcgtctgactcacaagccatgactgccccaccttcttacaacaa

SEQ ID NO: 3804 - DNA, 70 bp, Homo Sapien
tattgtcgactgcatcaaaatggtttccaggacaacaccttatgaaccaaagagaggcgtacccttatct

SEQ ID NO: 3805 - DNA, 70 bp, Homo Sapien
agtagccaagctgcttgtcctgggcctgcccctgtgtattcaccaccaataaatcagaccatgaaacctg

SEQ ID NO: 3806 - DNA, 70 bp, Homo Sapien
ctccaggcttttcttggggaagataccccttttctgaggaatgagtttgcctccgtcccctgcccatgct

SEQ ID NO: 3807 - DNA, 70 bp, Homo Sapien
attaaaggaactgagtacattaccctgatgtctaaatggaccaaagatctgagatccattgtgattatat

SEQ ID NO: 3808 - DNA, 70 bp, Homo Sapien
tgggctgtagctatgataaaccggcaggagattggtggacctcgctcttataccatcgcagttgcttccc

SEQ ID NO: 3809 - DNA, 70 bp, Homo Sapien
ctgtctgtgcagatgctttgcccaggcttctcaccacggtgtaccgggatattaaacctctttccccagc

SEQ ID NO: 3810 - DNA, 70 bp, Homo Sapien
gaaaagtaagaagcagtcaattttcacatcaaagacagcatctaagaagttttgttctgtcctggaatta

SEQ ID NO: 3811 - DNA, 70 bp, Homo Sapien
gtgtcggtcttccagtctccagccggtgaagacaaagtgcacctctgactcctattaccaggataactgt

SEQ ID NO: 3812 - DNA, 70 bp, Homo Sapien
agtgacaagggcatctcccttcgcttccctcggtttattcgagtccgtgaagacaagcagccggagcagg

SEQ ID NO: 3813 - DNA, 70 bp, Homo Sapien
tcaattctcatttgtcacacactttggctattagagatcaaccccttcgctcctgtgtcttgcaatggca

SEQ ID NO: 3814 - DNA, 70 bp, Homo Sapien
gtgccccctttggagggactgcctatcttcattcttcgactagccactgaggtgaattgggacgaagaaa

SEQ ID NO: 3815 - DNA, 70 bp, Homo Sapien
ttgggattcatgttgcagagcttgctaatttccctaagcatgtaatagagtgtgctaaacagaaagccct

SEQ ID NO: 3816 - DNA, 70 bp, Homo Sapien
actttgctgccacaatacctcggcccttctcagttcgctacgacccatacacccaaaggattgaggtctt

SEQ ID NO: 3817 - DNA, 70 bp, Homo Sapien
ctcagtgtatgatgggaagctgctcataggcactttataccacagagccttgtattgtgaactctaaatt

SEQ ID NO: 3818 - DNA, 70 bp, Homo Sapien
ataatatgatttcgggccttcccgctaaaataagaataaggttaagtaccaattctgccgacaaaggcag

SEQ ID NO: 3819 - DNA, 70 bp, Homo Sapien
caaagctttttccagaggctattattttcactgtagaatgatttcatgctatctctgtgtgcacaaatat

SEQ ID NO: 3820 - DNA, 70 bp, Homo Sapien
tggtctggacaagaagcgagtaagccactgcggttggtcatactgaagggaattgatggcaagaggatcc

SEQ ID NO: 3821 - DNA, 70 bp, Homo Sapien
ggagtccagagcccacgtctactgcggaaaagtcaggggaaactgccaaacaaaggaaaatgccccaaag

SEQ ID NO: 3822 - DNA, 70 bp, Homo Sapien
caaatcaatgcgtacgtttcctgagaagtgtctaaaaacaccaaaaagggatccgtacattcaatgttta

SEQ ID NO: 3823 - DNA, 70 bp, Homo Sapien
ctcaggtgctagggaaggcgggaaccttgggttgagtaatgctcgtctgtgtgttttagtttcatcacct

SEQ ID NO: 3824 - DNA, 70 bp, Homo Sapien
acacaggcatgactgggatcccgtgtaccgagtacacgacccaggtatgtaccaagtaggcacccttggg

SEQ ID NO: 3825 - DNA, 70 bp, Homo Sapien
gaggcaggatatataagcgccagtggtagttgggaggaataaaccattatttggatgcaggtggtttttg

SEQ ID NO: 3826 - DNA, 70 bp, Homo Sapien
caagaagagtagaagacagagccttactttataatcagaattatgaaaagaggagccaatgagagggaaa

SEQ ID NO: 3827 - DNA, 70 bp, Homo Sapien
ggaagcagctccgggtaggtgatgggtaacattccttaaatggtgcatgtcactggcctttcagctggga

SEQ ID NO: 3828 - DNA, 70 bp, Homo Sapien
ttatataccttcaagcaaccctttggattatgcccatgaacaagttagtttctcatagctttacagatgt

SEQ ID NO: 3829 - DNA, 70 bp, Homo Sapien
ttggtagtttctacagttgggcagctggttaggtagagggagttgtcaagtcttgctggcccagccaaac

SEQ ID NO: 3830 - DNA, 70 bp, Homo Sapien
tctgcccatataagaagaactgtgcggcacagcgcccgctactacagctcgtcacacggtgttgtccgac

SEQ ID NO: 3831 - DNA, 70 bp, Homo Sapien
gtcttctatctgggcacacgtgtttcacgttgacaggtttgcttgggacgctagtaaccatgggcttgct

SEQ ID NO: 3832 - DNA, 70 bp, Homo Sapien
atcgagctagccattgtgggctccgacatgcaggaagtcatcggcacggccattgcattcaatctgctct

SEQ ID NO: 3833 - DNA, 70 bp, Homo Sapien
atatttatctgattaagttgtctaaacaatgctgatttggtgaccaactgtcactcattgctgagcctct

SEQ ID NO: 3834 - DNA, 70 bp, Homo Sapien
taggctttgtgttatgtgatggcactatttcaattggctttctaattggacaattgatactatgctatct

SEQ ID NO: 3835 - DNA, 70 bp, Homo Sapien
tatcttgtgccaaaacgaaacaattgcgagttgtaaatgggattccaacacgaacaaacataggatggat

SEQ ID NO: 3836 - DNA, 70 bp, Homo Sapien
acctctgccccagataggtggtgccagtggcttattaattccgatactagtttgctttgctgaccaaatg

SEQ ID NO: 3837 - DNA, 70 bp, Homo Sapien
accaagaattgattttgtagccaacattcattcaatactgttatatcagaggagtaggagagaggaaaca

SEQ ID NO: 3838 - DNA, 70 bp, Homo Sapien
gtaattttcagccttttatatcactaaaataagatcatgttttaattgtgagaaacagggccgagcacag

SEQ ID NO: 3839 - DNA, 70 bp, Homo Sapien
aatgaagtttgctgtggtattgcatagccttgctttcttgaactaaactgtttgcccttcacaagtagtt

SEQ ID NO: 3840 - DNA, 70 bp, Homo Sapien
tgatacatgaagactttccatatcaagagacatggtattgactcaacagtttccagtcatggccaaatgt

SEQ ID NO: 3841 - DNA, 70 bp, Homo Sapien
tgctggcacccagcgactcgccagagtggttatcttttgatgtcaccggagttgtgcggcagtggttgag

SEQ ID NO: 3842 - DNA, 70 bp, Homo Sapien
tcagaagatgtatggtatctccctttgccaagccatcctggatgaaaccaaaggagattatgagaaaatc

SEQ ID NO: 3843 - DNA, 70 bp, Homo Sapien
gagtttggaactctaccctggtaggaaagcaccgcagcatgtggggaagcaagacgtcctggaatgaagc

SEQ ID NO: 3844 - DNA, 70 bp, Homo Sapien
caccacaccgacctgcgatgagaaggtcgtctggactgtgttccgggagcccattcagcttcacagagaa

SEQ ID NO: 3845 - DNA, 70 bp, Homo Sapien
agtttcagatcctcgtaggccacaggggaaaaaggtccatttgtctcaccgggaggctcaatattgcctg

SEQ ID NO: 3846 - DNA, 70 bp, Homo Sapien
agtgcagagcgcttgtacacaatggacggtatcaccgtgactgtggccgacctgttctttgcggggacag

SEQ ID NO: 3847 - DNA, 70 bp, Homo Sapien
ggcgggggcaccatattgcgcacaaacacccctatcacgaaaattacaccccccaacggcaacttttaca

SEQ ID NO: 3848 - DNA, 70 bp, Homo Sapien
ttgggtcggccagttcagcggatgctatggtgccggggcgacaaggtcgcaactataatctaaccgcctt

SEQ ID NO: 3849 - DNA, 70 bp, Homo Sapien
tgactttgactcaataaaccactcaccctattattggaaagtgccataggccttgagaaagtatagttac

SEQ ID NO: 3850 - DNA, 70 bp, Homo Sapien
actgaagagcgagttagttatgtatagcagaactggcagttgtcatcaaacataatgatgagtaagatga

SEQ ID NO: 3851 - DNA, 70 bp, Homo Sapien
cccctaccccgacccctccacgtatctttcctaggcagatcacgttgcaatggctcaaacaacattccac

SEQ ID NO: 3852 - DNA, 70 bp, Homo Sapien
cactggcaatagtatggctcccaatgttagtgtggaaataatggtaccaaattcttttagcccccaaact

SEQ ID NO: 3853 - DNA, 70 bp, Homo Sapien
cagcatcagctcagggcttcatcgtggggctctcagttccgatttcccaggctgaattgggagtgagatg

SEQ ID NO: 3854 - DNA, 70 bp, Homo Sapien
tgtgctgcactcctgcaatgttaaccttggtcagcactcggcacacccctgcgcggtgcacataacagca

SEQ ID NO: 3855 - DNA, 70 bp, Homo Sapien
cttactgggaggagaaagagtcacctgaaggggaacatgaaaagagactaggtgaagagagggcagggga

SEQ ID NO: 3856 - DNA, 70 bp, Homo Sapien
aaacgcagctgcaactgaagcggagactctaaacccagcttgcaggtaagagctttcacctttggtaaaa

SEQ ID NO: 3857 - DNA, 70 bp, Homo Sapien
gaaggggaggctgctgcattgtgggtgatgacgtaggacatgtgcttggtacaaaaagggcctgagacat

SEQ ID NO: 3858 - DNA, 70 bp, Homo Sapien
ggcaaatacactacgaacaacagctcagaacaacgtgtctctctggacattgacctctgggacaagttca

SEQ ID NO: 3859 - DNA, 70 bp, Homo Sapien
ggctcagagtgagcgctgggtacagcgcccgaatcggacagtgtagaaccattctctactgccttccttc

SEQ ID NO: 3860 - DNA, 70 bp, Homo Sapien
gaagggctctttggatctctgggcttttcaagattctgctaagatctgtattaatcatcttgtgcatggg

SEQ ID NO: 3861 - DNA, 70 bp, Homo Sapien
gggcacgaggggacatatctgtgaaccctccacggtggaaaaaatgccgcccttagtcgggtggggaaaa

SEQ ID NO: 3862 - DNA, 70 bp, Homo Sapien
aaccttgaaaatctcagaaaacagtaagccaagctaactgcctctttttgtcttttcagatccgccgtca

SEQ ID NO: 3863 - DNA, 70 bp, Homo Sapien
tttgatagttctgaagagcaaatgaatcctagtacattgaagagtaccgtactctatctggcacttaatt

SEQ ID NO: 3864 - DNA, 70 bp, Homo Sapien
atggaagagggtgtagtaatgcgtatcagaggtagcggagaatgaagagcgacaagtgggacgagctgta

SEQ ID NO: 3865 - DNA, 70 bp, Homo Sapien
gaagagcgaggagcgaagaaggaagacgagacgactagaagcacacaataagacgacaaccagacacaaa

SEQ ID NO: 3866 - DNA, 70 bp, Homo Sapien
acaatgccgggggccctcagcttggtgttggagaaaggcccatagtgtcatgttacagcatcctgtgggg

SEQ ID NO: 3867 - DNA, 70 bp, Homo Sapien
tgagtgttgatgtttttctgcactagaaggcactatgttgaactattaaacttaccagcactttcttttt

SEQ ID NO: 3868 - DNA, 70 bp, Homo Sapien
gtgcggaggaagtaattaggttgggcgagtcggtatcggttgtgatgttggcgtatcgtatgtctggagg

SEQ ID NO: 3869 - DNA, 70 bp, Homo Sapien
tcctgaagcgcgataacctcctcatagctgacattgaacttggctgcggcaactttggctcagtgcgcca

SEQ ID NO: 3870 - DNA, 70 bp, Homo Sapien
atacagccttttgggtaaacactgggaactccagaagttgtggggagagtggggaatcagacagccgcct

SEQ ID NO: 3871 - DNA, 70 bp, Homo Sapien
ccacacctgtgtctgtatatagtcagcttatctcgtgttcaatcgtctgatctctacagagagaagtgga

SEQ ID NO: 3872 - DNA, 70 bp, Homo Sapien
gtacctgagctacaccctgaacccggacttaatccggaagcaggacgccacctctaccatcatcagcatt

SEQ ID NO: 3873 - DNA, 70 bp, Homo Sapien
tctagtagtatgcaaagattgtgctccttctttaagaaagtgtcctatttgtaggagtacaatcaagggt

SEQ ID NO: 3874 - DNA, 70 bp, Homo Sapien
attagcaacacttagccaactatatgccacctatctgcctatgtatacttttcaatgcccaactattctt

SEQ ID NO: 3875 - DNA, 70 bp, Homo Sapien
ctggaagctgtaggctaatgggactggcccacagctttcctactctacttcattaccacactgggtttca

SEQ ID NO: 3876 - DNA, 70 bp, Homo Sapien
attgtgtgtcattgtattctttggttctgctcccccactattgaccaatgtatgagatgggaagaggggg

SEQ ID NO: 3877 - DNA, 70 bp, Homo Sapien
tctggaaacttagccaaaatatttctgagctaaaagatggtgaattgtggaataaattctttgtgcggat

SEQ ID NO: 3878 - DNA, 70 bp, Homo Sapien
agggaagccgtgcttctgaggaacaactctaattagtacacttgtgtttgtagatttacactttgtatta

SEQ ID NO: 3879 - DNA, 70 bp, Homo Sapien
ttcctttggatgtagtagataatcagacagagaagttggacaccaacataactgaggtggatgcagcctc

SEQ ID NO: 3880 - DNA, 70 bp, Homo Sapien
gcaataaataccagacacgtacaaaatccagctatgaatatagagggcttatgattcagattgttatcta

SEQ ID NO: 3881 - DNA, 70 bp, Homo Sapien
ggatttttggctacacacaaaccagtatcgctcatagatcagcaaaccggggcctactagagtctgaaca

SEQ ID NO: 3882 - DNA, 70 bp, Homo Sapien
ataccctggaaagtcttaagccttgtctcatggaccttcaccagacctacctcaaagcaccacagcatgc

SEQ ID NO: 3883 - DNA, 70 bp, Homo Sapien
accaatgtcattctgccacgtatgttccatatgtcctatctatctgccctgcacaattatgagagggaag

SEQ ID NO: 3884 - DNA, 70 bp, Homo Sapien
gcaaagaggcaagcgcaagacgacaggaaacgaagcgagagacgagaagccggtgacgagcaggagaaag

SEQ ID NO: 3885 - DNA, 70 bp, Homo Sapien
gagccccactattacatctcccccaaacgcactgcctcgaagaagttcacgactctttactagtgacagc

SEQ ID NO: 3886 - DNA, 70 bp, Homo Sapien
taacatccaagccagagtttttaaagccttctggatccatggggggagaagtgatatggtgaagggaagt

SEQ ID NO: 3887 - DNA, 70 bp, Homo Sapien
tgaggttacagatgtcagagcgtaacattctcagccgcctggcaaaccgggcacccgaacctaccccaca

SEQ ID NO: 3888 - DNA, 70 bp, Homo Sapien
tttcaaccttcggtgtgcttgggagtggcgattgtgatttacacgacaaaatgccgaggtgctcggtgga

SEQ ID NO: 3889 - DNA, 70 bp, Homo Sapien
agtccttgcccacaacgatgtggagccctgtgaaagtcggattcgaataaagggccacgtgtgcacccag

SEQ ID NO: 3890 - DNA, 70 bp, Homo Sapien
cattacctacacttccactacccaaagacaaaatgtgcccactgtgtgcttttgagtgtattttctttta

SEQ ID NO: 3891 - DNA, 70 bp, Homo Sapien
gaaacctccaccagtccaacttcagcttatcaggtgcccagatagatgacaacaatcccaggcgcaccgg

SEQ ID NO: 3892 - DNA, 70 bp, Homo Sapien
gagagaataagtcatgttccttcaagatcatgtaccccaatttacttgccattactcaattgataaacat

SEQ ID NO: 3893 - DNA, 70 bp, Homo Sapien
gatgaagagtggcggcagacagagcgcaggagagcgaacagaacgaccaagaagagccagacgaagagca

SEQ ID NO: 3894 - DNA, 70 bp, Homo Sapien
tgagcaacctgtccctagaaggcatcgcagtgctaaacatccctagcatgcatggtggctccaacctctg

SEQ ID NO: 3895 - DNA, 70 bp, Homo Sapien
aaggagatgatgtggcccggatcagctggtacctccgtgacatcatcactcgataccaggagaccttcaa

SEQ ID NO: 3896 - DNA, 70 bp, Homo Sapien
cccctaatcactgtcgcctgtaattctccaaaacccttccaccaattcatgcgctatcaaatgtattatt

SEQ ID NO: 3897 - DNA, 70 bp, Homo Sapien
ttctcgcctcactttccaccaagtgtctagagtcatgtgagcctcgtgtcatctccggggtggccacagg

SEQ ID NO: 3898 - DNA, 70 bp, Homo Sapien
gagcaagcacataaacgagggaacacatcatacaccagtccgcgaagcgctaggaccatacgagacagac

SEQ ID NO: 3899 - DNA, 70 bp, Homo Sapien
gtagtggtgcatgtgctgaagctgcagggtgccgtgcccttcgtgcacaccaatgttccacagtccatgt

SEQ ID NO: 3900 - DNA, 70 bp, Homo Sapien
aagaaccgcaccttctccgtctggtacgtccccgaggtgacggggactcataaggttactgtgctctttg

SEQ ID NO: 3901 - DNA, 70 bp, Homo Sapien
agactgtcgctgggtccaagatgcaaggcttgctggagcgcgtgaacacggagatacactttgtcaccaa

SEQ ID NO: 3902 - DNA, 70 bp, Homo Sapien
agagtcaaatttagagcagaaaatactagcaaaggggactgaaaagcggtggccaattgagcttcaaatg

SEQ ID NO: 3903 - DNA, 70 bp, Homo Sapien
tgatgattttggcccttgatggatctaaaactcggaacattactcctcaatgccgtttccccagttgctc

SEQ ID NO: 3904 - DNA, 70 bp, Homo Sapien
ctggccttgaaaggcatcgactacgagacggtgcccatcaatctcataaaggatgggggccaacagtttt

SEQ ID NO: 3905 - DNA, 70 bp, Homo Sapien
tgaatgtaaaatctgtggtcttactttggtgtctgctccccacttggcacggtcttaccatcatttgttt

SEQ ID NO: 3906 - DNA, 70 bp, Homo Sapien
ttgtcggtcaggcgcgacaccacgctcgcaatgataccacacatcactacaactccgcccgacgacaaac

SEQ ID NO: 3907 - DNA, 70 bp, Homo Sapien
catcccctgtgggaaattagtaggctcatttactgttttaggtctagcctatgtggattttttcctaaca

SEQ ID NO: 3908 - DNA, 70 bp, Homo Sapien
taagggccagccttgaaagggatactagcctgcagtgggcatctgtcaccgtgtgtgtgcccaagtggga

SEQ ID NO: 3909 - DNA, 70 bp, Homo Sapien
taacaaaataaactacaaattcctgacccaaggacactgtgttataagaggcgtgggctcccctggtggc

SEQ ID NO: 3910 - DNA, 70 bp, Homo Sapien
ccctcaagacccggaatgtgcctgttcggctcctgctctatcccaaaagcacccacgcattatcagaggt

SEQ ID NO: 3911 - DNA, 70 bp, Homo Sapien
gctcattgtcgaggtccttgaagatgtcccgctgaccatgcacaattttgtacggaagaccttcttcagc

SEQ ID NO: 3912 - DNA, 70 bp, Homo Sapien
aaaggaccctggtgggccagacgggttggacatcgttaataatcatagttggcttctaaatactggtagc

SEQ ID NO: 3913 - DNA, 70 bp, Homo Sapien
ctttctccaggaggattagcttggagttctctatactcaggtacctctttcagggttttctaaccctgac

SEQ ID NO: 3914 - DNA, 70 bp, Homo Sapien
ccagcttgtcgcaagtaacgacacggaacagctcgaacgctcgtgactttattgcagaaaagccccgcag

SEQ ID NO: 3915 - DNA, 70 bp, Homo Sapien
cctcgcaagctgggtaatcgatgggggagtctgaagcagatgcaaagaggcaagaggctggattttgaat

SEQ ID NO: 3916 - DNA, 70 bp, Homo Sapien
tggaacccggcacagtcttcactaccgtagaagaccttggctccaagatactcctcacctgctccttgaa

SEQ ID NO: 3917 - DNA, 70 bp, Homo Sapien
actagggagggtgtgaggggcacggtgccatgtggggatgttggtgatatggccctgtgtgttatacctt

SEQ ID NO: 3918 - DNA, 70 bp, Homo Sapien
gttgcactattgcaaaacgggtgtattatccaggtactcgtacactatttttttgtactgctggtcctgt

SEQ ID NO: 3919 - DNA, 70 bp, Homo Sapien
ccgacaacgaagcacgcacaaggaacgcaccagatcaaccgacagcagaacgcacgagagccaagaccat

SEQ ID NO: 3920 - DNA, 70 bp, Homo Sapien
ggcttcaaaatagagaatcccactttctatagcagattgtgtaacaattttaatgctatttccccagggg

SEQ ID NO: 3921 - DNA, 70 bp, Homo Sapien
tcaccggggtggtttagtggctcaacattgtgttcccatttcagctgatcagtgggcctccaaggagggg

SEQ ID NO: 3922 - DNA, 70 bp, Homo Sapien
atgatcagtgtatgcgaaaaggtttttaggaagtatggcaaaaatgttgtattggctatgatggtgacat

SEQ ID NO: 3923 - DNA, 70 bp, Homo Sapien
tttgactctacactcaaagccatctgatgctcacatttcatgtagtcagaggaggccatctggtttgaat

SEQ ID NO: 3924 - DNA, 70 bp, Homo Sapien
caaaatctggtacattcctgcaatgcatatcattcagacataaagatgggccgaagtacagatacatgct

SEQ ID NO: 3925 - DNA, 70 bp, Homo Sapien
agctggagcgaagcttgcgggacgtcgtagagaaaaccatccaaaagtacggcaccaaccccgaggagac

SEQ ID NO: 3926 - DNA, 70 bp, Homo Sapien
ccactgcagtttaatggatgagatgcccacttttaagccaaaaatactaagctcagactggacctcctct

SEQ ID NO: 3927 - DNA, 70 bp, Homo Sapien
ccagagaaacgaagtgagcagaactcgtaggaaaggctcgtgggtaaggagagtgcgcgcggtgactgca

SEQ ID NO: 3928 - DNA, 70 bp, Homo Sapien
ttcttatgccttggtcagagtaataactgaaggagttgcttatcttggctttcgagtctgagtttaaaac

SEQ ID NO: 3929 - DNA, 70 bp, Homo Sapien
aatgcctcccattcggatggatctctgcgtttttatactgagtgtgcctaggttgccccttattttttat

SEQ ID NO: 3930 - DNA, 70 bp, Homo Sapien
gcactgccaaagcttgtccgtgggagtgccacactcataactgccaggttccgacttctgtccaccctag

SEQ ID NO: 3931 - DNA, 70 bp, Homo Sapien
gaccgaggttcccactctgggcaaagcccctcacactgcaagggattgtagataacactgacttgtttgt

SEQ ID NO: 3932 - DNA, 70 bp, Homo Sapien
cttccttttagtattcttagttgttcagttgccaaggatccctgatcccattttcctctgacgtccacct

SEQ ID NO: 3933 - DNA, 70 bp, Homo Sapien
ggaaaatattgagctaggcacattactctctgaacgaaattcatattatcttattaaggaagagtgttgg

SEQ ID NO: 3934 - DNA, 70 bp, Homo Sapien
atcaaagccacactctgggctccagagtggggatgacatgcactcagctcttggctccactgggatggga

SEQ ID NO: 3935 - DNA, 70 bp, Homo Sapien
gtgtatctggtttctacatggaagactaaactcatgcttattgctaaatgtggtctttgccaactaaatt

SEQ ID NO: 3936 - DNA, 70 bp, Homo Sapien
ttgaggccaacatgttcagcgtcatcatccccatgtgcctggtacttctgctcctggcgctcatcctgcc

SEQ ID NO: 3937 - DNA, 70 bp, Homo Sapien
gtttttcggacagtttatttgttgagagtgtgaccaaaagttacatgtttgcacctttctagttgaaaat

SEQ ID NO: 3938 - DNA, 70 bp, Homo Sapien
gccatgaaaccagagacaaaatctctatactgccctgagttggggggaattctcagtgccaactgtggct

SEQ ID NO: 3939 - DNA, 70 bp, Homo Sapien
gcagagaatcacgtcctggaactgcatgttcttgcgactcttgggacttcatcttaacttctcgctgccc

SEQ ID NO: 3940 - DNA, 70 bp, Homo Sapien
gggggccgaacttgaacctcaacacgacagccaacgtgcataagcatgcaacactaccgaggtagccaca

SEQ ID NO: 3941 - DNA, 70 bp, Homo Sapien
caagatgcaggaggtggtggcaaacctacagtatgacgatggcagcggtatgaagcgagaggccactgca

SEQ ID NO: 3942 - DNA, 70 bp, Homo Sapien
caccgctatggacagagcgcagtagtgattagtcgtatttcgcgacacctcacacggtagatgtgatcaa

SEQ ID NO: 3943 - DNA, 70 bp, Homo Sapien
aggtgcatgcgggcagtgatgggagaaggggaggcatgattcttctgaccctagaaatgttccctttaat

SEQ ID NO: 3944 - DNA, 70 bp, Homo Sapien
tttgctcactcccactcaccgatcaaaacctgctacctccccaagactttactagtgccgataaactttc

SEQ ID NO: 3945 - DNA, 70 bp, Homo Sapien
gcagccttgctgttgagtcagtccaaggggttttacttaggacaagttgtaccttgccctctctccagct

SEQ ID NO: 3946 - DNA, 70 bp, Homo Sapien
tttggcttataaacacattgaatgcgctttattgcccatgggatatgtggtgtatatccttccaaaaaat

SEQ ID NO: 3947 - DNA, 70 bp, Homo Sapien
tttgcacataacatgctttagattatatattccgcacttaaggattaaccaggtcgtccaagcaaaaaca

SEQ ID NO: 3948 - DNA, 70 bp, Homo Sapien
cctgatcccactgctgttgaacagatcagcctagagagtgtcgacatggacagccccgtcaacatgaagt

SEQ ID NO: 3949 - DNA, 70 bp, Homo Sapien
catgcctcctgcatttcgctacccgagtttagtaacagtgcagattccacgttcttgttccgatactctg

SEQ ID NO: 3950 - DNA, 70 bp, Homo Sapien
atgatgacatgtcgaagtctacccaatatcccccagtaagagaataaggggcaagaatgactcatgaact

SEQ ID NO: 3951 - DNA, 70 bp, Homo Sapien
tatagtttggctggggagcacttaattcttcccatttcaaaaggtaatgttgcctggggcttaacccacc

SEQ ID NO: 3952 - DNA, 70 bp, Homo Sapien
gtaacctcttcaactggacgctctcctaccgggcggactcggacgtctttgtgccttatggctacctcta

SEQ ID NO: 3953 - DNA, 70 bp, Homo Sapien
acctcttttgccccccacacaaaagcccctttggtgtgaaaaacggcccccacaagtttataaaaggggg

SEQ ID NO: 3954 - DNA, 70 bp, Homo Sapien
tcatccggcccaagaagcgcctgattgtcagtaaacgggcaggtactcagtgcaccaactgccagacgac

SEQ ID NO: 3955 - DNA, 70 bp, Homo Sapien
aacatctgataaaacttacagccccctacaccaagagtgtatctgtgaaagagctcctacactttgaaaa

SEQ ID NO: 3956 - DNA, 70 bp, Homo Sapien
gccatgtacagtatgttcaaagtcaaataactcctcattgtaaacaaactgtgtaactgcccaaagcagc

SEQ ID NO: 3957 - DNA, 70 bp, Homo Sapien
atggaatctgcagccgctccatggcctcgatcatggcccgcatggacacgaagatgttctggtagaccag

SEQ ID NO: 3958 - DNA, 70 bp, Homo Sapien
atctcagtcatttgacttagaaagtgcccttcaaaaggaccctgttcactgctgcacttttcaatgaatt

SEQ ID NO: 3959 - DNA, 70 bp, Homo Sapien
ctgcttctcttttcctcgcagatgataaaaggaatctggcattctacacctggaccatttgattgtttta

SEQ ID NO: 3960 - DNA, 70 bp, Homo Sapien
gaccttacattcacactttggatgttcttgaggtgaattccctgcagtgtctgcaagcactggcagcgca

SEQ ID NO: 3961 - DNA, 70 bp, Homo Sapien
atcagctaagctcccttggcgatctgcaggaacactagtaatgactggaattactccgtgatctttgatg

SEQ ID NO: 3962 - DNA, 70 bp, Homo Sapien
agtttcacaacatcctgtaacattggcttacctgtatattatatgccacccgtaaccataaaaacaccag

SEQ ID NO: 3963 - DNA, 70 bp, Homo Sapien
aggaggcaaaaccaaaagtttatgtggtgcttggggtggaccggtcggcggatgtcgtgcgttaattaaa

SEQ ID NO: 3964 - DNA, 70 bp, Homo Sapien
ctgagaggtgtcggatgctcttggctttaaggatcaatgtcttagccaaaggatacagtggcatttccct

SEQ ID NO: 3965 - DNA, 70 bp, Homo Sapien
caccaggaatcagggaggcaggctctgaggacatcatcgtggttgccctgtatgattacgaggccattca

SEQ ID NO: 3966 - DNA, 70 bp, Homo Sapien
aattattgtccaaggctatatttctgggatgaatataatctgaggaagggagttaaagaccctcctgggg

SEQ ID NO: 3967 - DNA, 70 bp, Homo Sapien
ggagcaagaaagttcaacgaggatctgcataaacagggttcctgacctcaccgaaaagactaatgtgcct

SEQ ID NO: 3968 - DNA, 70 bp, Homo Sapien
gtcaaatttcctaactttgctgtgcaaaggttgagagctattgctgattagttaccacagttctgatgat

SEQ ID NO: 3969 - DNA, 70 bp, Homo Sapien
aaaatgcaggttgtagctttttgatgggctactcatacagttagattttacagcttctgatgttgaatgt

SEQ ID NO: 3970 - DNA, 70 bp, Homo Sapien
aggtttggcacccacttctccacaccttgagggctcggggatactggatacacccgtgacctcaaccaag

SEQ ID NO: 3971 - DNA, 70 bp, Homo Sapien
cttgcatttatttaagacactgttacagagatactgttgtcaccttctggggcacggtctttggggagag

SEQ ID NO: 3972 - DNA, 70 bp, Homo Sapien
aaaatattgggcactcggttatcttttaaaattcacacagaaaaattccgtttggtagactccttccaat

SEQ ID NO: 3973 - DNA, 70 bp, Homo Sapien
atttgcctcgtgagctggacgcttggcactgataagtaccattatgtgttacgttgacgaagaacgggat

SEQ ID NO: 3974 - DNA, 70 bp, Homo Sapien
tacatcttggacctgcagatcgccctggactcgcatcccactattgtcagcctgcatcaccagagacccg

SEQ ID NO: 3975 - DNA, 70 bp, Homo Sapien
aaggtcttttcagagcgtggaggtgtggaaggagtggctgctctccaaactatgccaaggcggcggcaga

SEQ ID NO: 3976 - DNA, 70 bp, Homo Sapien
cagatgtgggcggcctgtgtgaacctgtcgtgcaaagctcacgtcaccaactgctgcagttatctcctga

SEQ ID NO: 3977 - DNA, 70 bp, Homo Sapien
cctctagatgtccaagtgccacgtgaactatgcaatttaaagggttgacccacactagacgaaactggac

SEQ ID NO: 3978 - DNA, 70 bp, Homo Sapien
agtggcagccaacaaacgtggatgggaaggggtacctactcaatgaacctggagtccagcccacctctgt

SEQ ID NO: 3979 - DNA, 70 bp, Homo Sapien
ttgcggttactctttaggccttgtctgtaaaacgaatggctcaggctaagtgatctctaaatgcctaaat

SEQ ID NO: 3980 - DNA, 70 bp, Homo Sapien
acccccgtgaaatatgcccgcctctggtcggagattccctcggagatcgccattgacgactatgatagta

SEQ ID NO: 3981 - DNA, 70 bp, Homo Sapien
agttgtacgcccaggcaacaagggctgagctgcgcttgcgtggctgtttcatgaccgcttgtttttctcc

SEQ ID NO: 3982 - DNA, 70 bp, Homo Sapien
ttcaaagccgggtagcgcgcgcgagtcgacaagtaagagtgcgggaggcatcttaattaaccctgcgctc

SEQ ID NO: 3983 - DNA, 70 bp, Homo Sapien
actaaaatggaacagcccttctaccacgacgactcatacacagctacgggatacggccgggcccctggtg

SEQ ID NO: 3984 - DNA, 70 bp, Homo Sapien
atagtagttaccttgcagggtcgttgtcaggttatgtgagaaaaaataagcagggcattgaattcactgc

SEQ ID NO: 3985 - DNA, 70 bp, Homo Sapien
gtgggaatcagaaaaacctgttcccatcaccggcctagcctagaatcctagcctagaagccctctctccc

SEQ ID NO: 3986 - DNA, 70 bp, Homo Sapien
aggggatgcgaaggacggggaccttaaccccgggtcttctcctgagctgccgaataaacttttggtccca

SEQ ID NO: 3987 - DNA, 70 bp, Homo Sapien
ctagtgaggaaagcctctgatctggcagactcattgcagcaggtggtaatgataaaatactaaactacat

SEQ ID NO: 3988 - DNA, 70 bp, Homo Sapien
ccacatgaatggtagatgtaggcagcatgagtggttaagagtcaagggagtagccggggtagtggcttac

SEQ ID NO: 3989 - DNA, 70 bp, Homo Sapien
aacattttcccaagtgtgggaacattatttttagattgagtaggtaccttgtagcagtgtgctttgcatt

SEQ ID NO: 3990 - DNA, 70 bp, Homo Sapien
aagtacatgataagcgaggttccccgtgtgtaggtagatctggtctttagaggcagatagataggtcagt

SEQ ID NO: 3991 - DNA, 70 bp, Homo Sapien
agaggagaggcgacagtcgcgagccacactttgcaatgaaactctttagactttctgccgggagagcggc

SEQ ID NO: 3992 - DNA, 70 bp, Homo Sapien
ttaaactcaaccaagctgtgataagtggaatggttactgtttatactgtggtatgtttttgattacagca

SEQ ID NO: 3993 - DNA, 70 bp, Homo Sapien
agcgagccgcaggacgaacacgtcgattacgtggagagctacagcgtcatcgagaagctgtccaggaagt

SEQ ID NO: 3994 - DNA, 70 bp, Homo Sapien
aggagtcggccacctacattgcagaagagtattcacgcctgcgcagccaggatagcatgagctcagacac

SEQ ID NO: 3995 - DNA, 70 bp, Homo Sapien
ctaggttatgggtacggcaaccacatgtcccagatcgtctccaattcgaaaacaaccgtcctgctgtccc

SEQ ID NO: 3996 - DNA, 70 bp, Homo Sapien
aaatgcacttcatgcaatgaaatgaatcccccccttccatcacattgcaacagatgttgggcccttcgtg

SEQ ID NO: 3997 - DNA, 70 bp, Homo Sapien
acagaagtaatctgattagtcaaattattaagtgccatggattactttatgcagcagtcaggtacatagt

SEQ ID NO: 3998 - DNA, 70 bp, Homo Sapien
agtctatgttttagagctgcttaaaacaggaagtgatgtataaggtggtggttgttgcatggggacaatg

SEQ ID NO: 3999 - DNA, 70 bp, Homo Sapien
ggcgtggaggcaccgctgtattaaaggaagtggcagtgtcctgggaacaagcgtgtctgccctttctgtt

SEQ ID NO: 4000 - DNA, 70 bp, Homo Sapien
gggtgttctggtcgccgccccggatggtggtttcgatttatccgatgcccttcctgacaatgaaaacaag

SEQ ID NO: 4001 - DNA, 70 bp, Homo Sapien
tctgtgcctctgcgcgggtctcctggtccttctgccatcatgccgatgttcatcgtaaacaccaacgtgc

SEQ ID NO: 4002 - DNA, 70 bp, Homo Sapien
tgcttccttctacgtaggccaacctcaaaactttcagtaggaatgttgctatgatcaagttgttctaaca

SEQ ID NO: 4003 - DNA, 70 bp, Homo Sapien
aggaaggctggaagcgcgagatccagggtctcttcgacgagctgcgagccaaggaaaaggaactactgag

SEQ ID NO: 4004 - DNA, 70 bp, Homo Sapien
gaacacatgtgcagtcactggtgtcaccctggataggcaagggataactcttctaacacaaaataagtgt

SEQ ID NO: 4005 - DNA, 70 bp, Homo Sapien
tttatgttattacagggcattcaaatgggctgctgcttagcttgcaccttgtcacatagagtgatctttc

SEQ ID NO: 4006 - DNA, 70 bp, Homo Sapien
ttggagaaagcgtttttaactgcaactttctataatgccaaaatgacacatctgtgcaatagaatgatgt

SEQ ID NO: 4007 - DNA, 70 bp, Homo Sapien
cttggtgagaattttctaacagatttacactcagagcctggtcgccccccgttagcccagattcaaaagg

SEQ ID NO: 4008 - DNA, 70 bp, Homo Sapien
aggctgagtagaagatcctaccccaattccttgtaggagtataggccggtctaaagtgagctctatgggc

SEQ ID NO: 4009 - DNA, 70 bp, Homo Sapien
agcacctcgcatgagatgaatgtgcgtccagaacagccgcagttctcacccatgccagggaatgtacgcc

SEQ ID NO: 4010 - DNA, 70 bp, Homo Sapien
tgtaagttatgttttacatgccccgtttttgagactgatctcgatgcaggtggatctccttgagatcctg

SEQ ID NO: 4011 - DNA, 70 bp, Homo Sapien
tctctgcttatccgttagccgtggtgatttagcaggaagctgtgagagcagtttggtttctagcatgaag

SEQ ID NO: 4012 - DNA, 70 bp, Homo Sapien
tgtctctgaccaactcccagttctctacagagcacgggaaagcccctcggggacgtctttcctgcagtgt

SEQ ID NO: 4013 - DNA, 70 bp, Homo Sapien
gtttccgcgtacgaacacctaaggatctactaaccgttcgcattctacttaacgcaggtcctttctcttg

SEQ ID NO: 4014 - DNA, 70 bp, Homo Sapien
acacaggagattccagtctacttgagttagcataatacagaagtcccctctactttaacttttacaaaaa

SEQ ID NO: 4015 - DNA, 70 bp, Homo Sapien
taggtgatcacacacaccagccctgaacacgtgcggacaacgacacgcttcgcgcgctgttggatgtaac

SEQ ID NO: 4016 - DNA, 70 bp, Homo Sapien
tggcatctgcacggcggtagagggagataactgtgtgttcgatggggtcatctaccgcagtggagagaaa

SEQ ID NO: 4017 - DNA, 70 bp, Homo Sapien
ctctcaggagtcactctgtaaaatctgtgtacaccagtattttgcattcagtattgtcaaggccatgact

SEQ ID NO: 4018 - DNA, 70 bp, Homo Sapien
acggataactttatcttgtttgacgaagtgagtcccacacctcctatcactgtgacccacaaaccagaag

SEQ ID NO: 4019 - DNA, 70 bp, Homo Sapien
gctacttgaactgtcaggggcatctgcctaaaccagaatcttttgtcagaaaccttaacccaacaaaaca

SEQ ID NO: 4020 - DNA, 70 bp, Homo Sapien
catgtcagccccattgactaccttctcatgctctgaggtactactgcctctgcagcacaaatttctattt

SEQ ID NO: 4021 - DNA, 70 bp, Homo Sapien
tagaattttagaggcatagaagagagatcctaggtctagagactacaatccaaatagactaagttgggaa

SEQ ID NO: 4022 - DNA, 70 bp, Homo Sapien
tcagacgtgtgaacggcacaccgacaatcacatggacaccccccaagaagtgatacgagccaagccccca

SEQ ID NO: 4023 - DNA, 70 bp, Homo Sapien
agaaaggagcagtggtgtcgttcaccgtgagagtctgcatagaactcagcagtgtgccctgctgtgtctt

SEQ ID NO: 4024 - DNA, 70 bp, Homo Sapien
tggagtgataatattgtttccctcgtccgtctgtctcgatgcctgattcggacggccaatggtgcttccc

SEQ ID NO: 4025 - DNA, 70 bp, Homo Sapien
agttggtccaaggagggagagtgggttctcaatacggtaccaaagatataatcacctaggtttacaaata

SEQ ID NO: 4026 - DNA, 70 bp, Homo Sapien
atctccaggagtccatgagaggctttcttctcctatgtcccaattctcagaactcagatgtggctagacc

SEQ ID NO: 4027 - DNA, 70 bp, Homo Sapien
agggtatatatttcggaggtaaaagaaagtagctcatgccaacaagtaacattcaccagcatttattgag

SEQ ID NO: 4028 - DNA, 70 bp, Homo Sapien
ctgttttcttcatcatgagttctgctgaatgccgcgatgggtcaggtaggggggaaacaggttgggatgg

SEQ ID NO: 4029 - DNA, 70 bp, Homo Sapien
attaggaagtgtaacagctgaggtctcttgagggagcttagccaatgtgggagcagcggtttggggagca

SEQ ID NO: 4030 - DNA, 70 bp, Homo Sapien
ctgctaatgactgccagactgtggggaggcactctcctctggacctaaacctgaaatccccctctctgcc

SEQ ID NO: 4031 - DNA, 70 bp, Homo Sapien
caaaggataagaattcccggtccgacagaaagaggtctatatcagagagtagtcgatcaggcaaaagatc

SEQ ID NO: 4032 - DNA, 70 bp, Homo Sapien
aacttctttaactcaccaggaagggtagaattttgaaacctgattttctatacgttctcatttattcagg

SEQ ID NO: 4033 - DNA, 70 bp, Homo Sapien
ttaaggggatagtacctcccaattcaagcagagaaactgacctgactaaagttaatcgcagatgaactag

SEQ ID NO: 4034 - DNA, 70 bp, Homo Sapien
acagggtctgccggggaagtttcaacattagccaggcggtgatgttcaccttgggataccatggggccga

SEQ ID NO: 4035 - DNA, 70 bp, Homo Sapien
gaaaaacgcccacgtcagggtgaccatctgtggtaaccgagaattccttggaggcagcgtcttcaccgcc

SEQ ID NO: 4036 - DNA, 70 bp, Homo Sapien
ggtccatttcatgtgatctattactctgacataaacccatctgtaatatattgccagtatataagctgtt

SEQ ID NO: 4037 - DNA, 70 bp, Homo Sapien
gctttcctttgagattggatagcaaaccatataagtagtattccttatcatggctgagaacataagaaga

SEQ ID NO: 4038 - DNA, 70 bp, Homo Sapien
gatgtcaccctgtgctctcgtcacagactaacctgtcgtaggttaacagatcgcgagcacacacgtgctg

SEQ ID NO: 4039 - DNA, 70 bp, Homo Sapien
ataatatcaggcagttaccatacgagaaatcaaggtcgttgggacggaagtaaccttatctgcttttccc

SEQ ID NO: 4040 - DNA, 70 bp, Homo Sapien
ttgtgataggagggatatttacatattttagtggaccacattttaagttggatggtgtgctctaaaatac

SEQ ID NO: 4041 - DNA, 70 bp, Homo Sapien
aaaggcacaagatcacatttccagttaccctattacattgatatatacggccatgaaaagtagatggatt

SEQ ID NO: 4042 - DNA, 70 bp, Homo Sapien
tgaccaactgcggggagcatgacacaaccgaatacaaactccgtaccttacaggtctccccgctggacaa

SEQ ID NO: 4043 - DNA, 70 bp, Homo Sapien
tagctgataaaatctctaagccacaggaattaagttcagatctaaatgtcggtgatacttcccagaattc

SEQ ID NO: 4044 - DNA, 70 bp, Homo Sapien
tttgtaattgactaaagcattccagtgtcctctttctagattgccagctcatgacatggtgcttataaag

SEQ ID NO: 4045 - DNA, 70 bp, Homo Sapien
ggtgtcacggtcacctgcaaagtggagcatgagagcttcgaggaaccagccctgatacctgtgaccctct

SEQ ID NO: 4046 - DNA, 70 bp, Homo Sapien
tcttcaaaggcccagtttcccctcacgcagcctcttaggtagcgtttcccctaatcgtgggggttggacc

SEQ ID NO: 4047 - DNA, 70 bp, Homo Sapien
cttcaccccttatagttggctcgagagcatggaatccgatttttcgaaactagtgctaaatccagtatga

SEQ ID NO: 4048 - DNA, 70 bp, Homo Sapien
ctttctccagaggcagaacacatgttttcagagaagctgctgctaaggaccttctagactgctcacaggg

SEQ ID NO: 4049 - DNA, 70 bp, Homo Sapien
ggatgatggcagaaagattgtatttgtcccagggtgttccataccattaaccatagtaaaatcagatgga

SEQ ID NO: 4050 - DNA, 70 bp, Homo Sapien
agagtatgttacatggcatataacggattgattaccttagatgtttgcacctaactgtatatgagcaaat

SEQ ID NO: 4051 - DNA, 70 bp, Homo Sapien
cttttcgactttatactctgagttattacttactgtaagtggtgtatatgaaacctccatgcattttcca

SEQ ID NO: 4052 - DNA, 70 bp, Homo Sapien
ggcagtatgcaaaatgagcaattgagtgactcctttccatatgaattttttcaagtataacttgcaagat

SEQ ID NO: 4053 - DNA, 70 bp, Homo Sapien
cagaccagtaggaaccaggctgggtcaggctcttaatttcactatggtgggggacaaaatgaacactggc

SEQ ID NO: 4054 - DNA, 70 bp, Homo Sapien
acccaaatatgacctgtcctagtaacaaaactcgcaaaaattgtcaccacagtggaagccaggtgccttt

SEQ ID NO: 4055 - DNA, 70 bp, Homo Sapien
agaggggcctgtgggttgagacactatagagtgtgtcataaccgagaccggataggggagtagttacttc

SEQ ID NO: 4056 - DNA, 70 bp, Homo Sapien
aaaatggtggtattctcattctgtcgttttgcttgcctttattagctggaatggttttctaagaaagtgt

SEQ ID NO: 4057 - DNA, 70 bp, Homo Sapien
gagcatctggctgtttagcagaactcattctatccccaatcagctccttttccgttctgttctgctggga

SEQ ID NO: 4058 - DNA, 70 bp, Homo Sapien
cgtccgaaacacccgaactggtcaactctcaagagaccatctggttcaggttcctgactgggccagcgag

SEQ ID NO: 4059 - DNA, 70 bp, Homo Sapien
ctgtatacgatcgcatacaatcatgtctcacagcgctgatcttagcacattatgtcatgtttccatctca

SEQ ID NO: 4060 - DNA, 70 bp, Homo Sapien
ggaagaggaccccaagactgcatcccagtctttgctggtaaaccttcgggctatgcagaatttcttgcag

SEQ ID NO: 4061 - DNA, 70 bp, Homo Sapien
atgtggaccggctgagcaagaggacgcctgtgttccacaattacatgtatgcgcccgaggacgcagaggt

SEQ ID NO: 4062 - DNA, 70 bp, Homo Sapien
cgaacgggtgtgctgatctcgtggacatgcttccgctccagctgttagcgacttgagctcgtcttcacag

SEQ ID NO: 4063 - DNA, 70 bp, Homo Sapien
tccaagcccggtgtcatgtaagtgccagtcttcctgctcacctctatggaggtagggagggtcagggttg

SEQ ID NO: 4064 - DNA, 70 bp, Homo Sapien
tcgaattcataatatcgatggagcgggggagggagataataaaagaatagaagggttccttcccccccac

SEQ ID NO: 4065 - DNA, 70 bp, Homo Sapien
ctgcatcaacacttcagattctacattaccactcaaacgcgaaacacaatcaaaatacccgagagaccgc

SEQ ID NO: 4066 - DNA, 70 bp, Homo Sapien
ccggataaacaggtgtctaacgggcaatcgcctagaaacgatagagacagaacgcatgcgcgcaggcggg

SEQ ID NO: 4067 - DNA, 70 bp, Homo Sapien
ccttgccaacctgtgaggctatttcgtgtgagccgctggagagtcctgtccacggaagcatggattgctc

SEQ ID NO: 4068 - DNA, 70 bp, Homo Sapien
cgtttgcaagcgtatcacggatgtcacatcacactactcggatgacaatttcaacccgcaaaagaacaac

SEQ ID NO: 4069 - DNA, 70 bp, Homo Sapien
ccgaaagtcctggaccggtggctagcaatatcgtgtgttgcgcactcgtaaagtgtgttatttcaaccct

SEQ ID NO: 4070 - DNA, 70 bp, Homo Sapien
agtccacagagtcggtagaccaggggttacgtgactggggaaaatctcacatctccttgtctgaaaacat

SEQ ID NO: 4071 - DNA, 70 bp, Homo Sapien
tctgaaggacacggggacgttctcaccagcacatggtattaccggcctcgtcggtgtggtctgtctgatg

SEQ ID NO: 4072 - DNA, 70 bp, Homo Sapien
caggaatacaacttaagtaatcatgaggtccttccatatttagattgggtaagcatgaatgtgtattttc

SEQ ID NO: 4073 - DNA, 70 bp, Homo Sapien
tggatgcatgtgcgtcaccgtccactcctcctactgtattttattggacaggtcagactcgccgggggcc

SEQ ID NO: 4074 - DNA, 70 bp, Homo Sapien
acatgatcacggatacacgactctagccaccagtgtgaccctgttaaaagcctcggaagtggaagagatt

SEQ ID NO: 4075 - DNA, 70 bp, Homo Sapien
tttatctagagctttgtctcagcttgcagaggttgaggagaagatagaccagttacatcaagaacaagct

SEQ ID NO: 4076 - DNA, 70 bp, Homo Sapien
ccactaatctgtgactgctcctgtggaaactccacatcacaattctccaaaatttatcattgccatttta

SEQ ID NO: 4077 - DNA, 70 bp, Homo Sapien
cataatcctgcaagtactaggcgtggatatctggataatgaaggagtgtgaattaagaaggagtaccagg

SEQ ID NO: 4078 - DNA, 70 bp, Homo Sapien
ccacaaagactgagttctcatggggatcctacccttcctagtgccactccctatggccatgctgaagacc

SEQ ID NO: 4079 - DNA, 70 bp, Homo Sapien
ctcttcttgacgcttttcataatgtgcaaagtcatcaaagattgaggtggtatgcttgaaagtagcaatt

SEQ ID NO: 4080 - DNA, 70 bp, Homo Sapien
agcacgccaacgccttccaccagtggatccaagagaccaggacatacctcctcgatgggtcctgtatggt

SEQ ID NO: 4081 - DNA, 70 bp, Homo Sapien
tgaactgggacaggactatgagcatgtcacgatgttacaagaacgattccgggagtttgcccgagacacc

SEQ ID NO: 4082 - DNA, 70 bp, Homo Sapien
caaggtgttaggtgtgactgtcacaactgttatgttttccagtaaactagaagtacgatatttgataatt

SEQ ID NO: 4083 - DNA, 70 bp, Homo Sapien
ctttcagctgcccaacccagcaatccgggttctctttcttcgtgagacacgttatgagggaagccctgat

SEQ ID NO: 4084 - DNA, 70 bp, Homo Sapien
agcatttgggtaatttagattgtaaaccgctttggcctgagttattgagattgtcctcatttctccagat

SEQ ID NO: 4085 - DNA, 70 bp, Homo Sapien
accctctttcaggtggattcagagacctgtcctgtatataacagcactgtagcaataaacgtgacatttt

SEQ ID NO: 4086 - DNA, 70 bp, Homo Sapien
cttggaagattctatttaattgaaactctctgttcagaaagcaataactttgtctcgttcctgttgggct

SEQ ID NO: 4087 - DNA, 70 bp, Homo Sapien
aaagagatcgatattataccaacctgtgcggcccaccgcgaagtcgtactccgactcggccgccccaatc

SEQ ID NO: 4088 - DNA, 70 bp, Homo Sapien
catcttcaaagcttgaagatcgttagtatctaacatgtatcccaactcctataattccctatcttttagt

SEQ ID NO: 4089 - DNA, 70 bp, Homo Sapien
tgaatcccttagaggtctgtgaattgtaggttaagaacccctgccctagctaatcagatccaccaatgtt

SEQ ID NO: 4090 - DNA, 70 bp, Homo Sapien
cacttggagttgttttggttgcaggtgacagaaagcacgactcaaggtagcatcaaccaaacagggaggt

SEQ ID NO: 4091 - DNA, 70 bp, Homo Sapien
tctcagttccagttcccatcctttgattgatcactctccctgacatccacctgtatgactttgtcaccaa

SEQ ID NO: 4092 - DNA, 70 bp, Homo Sapien
ccttgattaatctttcaccgccccagcgcagacctgggaagcggaaaatcccgccgtattttcccagccc

SEQ ID NO: 4093 - DNA, 70 bp, Homo Sapien
aaggcagttcagtttttcgtacaggctctcaggatggctcctgaccacgagaaggcctgcattgcctgca

SEQ ID NO: 4094 - DNA, 70 bp, Homo Sapien
tgcatcttcaaatcactggcagattccggagttagcccgaaaagttaatacagagcagaaacataccact

SEQ ID NO: 4095 - DNA, 70 bp, Homo Sapien
actacgatactacaaacacaccacacaacccaactcaaaccacatcaatgcaatacatcaacaaaatcac

SEQ ID NO: 4096 - DNA, 70 bp, Homo Sapien
atgctgctttttctcaaaatgggacttgtgacggtgtacctgaggcccccatctccttaaagagtgtggc

SEQ ID NO: 4097 - DNA, 70 bp, Homo Sapien
aaactaattttggtacgtatgaatgatatctttgacctcaatggaggtttgcaaagactgagtgttcaaa

SEQ ID NO: 4098 - DNA, 70 bp, Homo Sapien
ctgtagtccggccctactcccacgtatccaacctagtctaccctagaatccactaacgctttattatgtt

SEQ ID NO: 4099 - DNA, 70 bp, Homo Sapien
agaccaaaaatgtctgctagctagttggtttctatacaaatacatattcgaatgtcttgctggatgaaga

SEQ ID NO: 4100 - DNA, 70 bp, Homo Sapien
gtctggtcagagttgctgagtgggttgatctctggtctttccttgacagtgcacgttcgaaggctgtggg

SEQ ID NO: 4101 - DNA, 70 bp, Homo Sapien
tgtatcggaagcatataccttggagggaccatgctatgagggaaagtgtaaatctagaaatgagaaaccc

SEQ ID NO: 4102 - DNA, 70 bp, Homo Sapien
tgcagatctcgtggacaagtgtttatcaaactgaaggttgcagcttgttagtgggttcagaaatcagttt

SEQ ID NO: 4103 - DNA, 70 bp, Homo Sapien
gtatgccagcaaggttcttcatgacagccagattccccgtaatggaaaagggcagcaagttggagacaga

SEQ ID NO: 4104 - DNA, 70 bp, Homo Sapien
accagatggttgtgtatgggtagcactactaaaagtttagaacttgcagtgtctttcggaatttttaaaa

SEQ ID NO: 4105 - DNA, 70 bp, Homo Sapien
actgtagaaaagggaactgaacattccagagcgtgtagtgaatcacgtaaagctagaaatgatccccagc

SEQ ID NO: 4106 - DNA, 70 bp, Homo Sapien
ttaagaatatcttcacgaacttgaccctcctactccacattgcaacatttccatcagacagcatttcaat

SEQ ID NO: 4107 - DNA, 70 bp, Homo Sapien
ctacaggaggagagccactgtggtctgaagagatgctactgcctggagactggggtcttaacctccagcc

SEQ ID NO: 4108 - DNA, 70 bp, Homo Sapien
ggattccctctgaaaccctagatcggggtatatgttaagggattacgaaaatctaggactttttgtgggg

SEQ ID NO: 4109 - DNA, 70 bp, Homo Sapien
ttctcagaccaagggacctggatgacaggcaatcaaggcctgagcaaccaaaaggagtgccccatatggc

SEQ ID NO: 4110 - DNA, 70 bp, Homo Sapien
aagtccagtctgtgccggggaaggcactggttaggaaggatgttcaaacggtcccacccaagcctgtcac

SEQ ID NO: 4111 - DNA, 70 bp, Homo Sapien
actgcttcggtatttatgcaactcaccacagaaaccaaatgaccgtgatcataaagtgagactggcactg

SEQ ID NO: 4112 - DNA, 70 bp, Homo Sapien
aagacagactttagtattctctatgtagtgccaagtaggcaaaagctcactcatgttcttattgcagcaa

SEQ ID NO: 4113 - DNA, 70 bp, Homo Sapien
ttggccaccaggtgcctttcaaatttagaaactaattgactttagaaagctgacattgccaaaaaggata

SEQ ID NO: 4114 - DNA, 70 bp, Homo Sapien
aagttatcgtaactgttcctgtggttgctttgaaagaacccttccttacctggtgtgttttctataaatc

SEQ ID NO: 4115 - DNA, 70 bp, Homo Sapien
aacagtcggtcttctatttcacacaagacttctcccgccgtattggttgcggaccttgcgcggccggagg

SEQ ID NO: 4116 - DNA, 70 bp, Homo Sapien
cacaaagcgaggagtgacgcgataaaacgccgaacggaacacgaactgcgacactgaaagaacccacccg

SEQ ID NO: 4117 - DNA, 70 bp, Homo Sapien
gagatgatattgaccttattgtccgttgtgagcacgatggcgtcatgactggagccaacggggaagtgtc

SEQ ID NO: 4118 - DNA, 70 bp, Homo Sapien
aaagttacactgaggctccccccaccgatgctgcatacagatggtgtcgggcaccaacgtgtacggcatc

SEQ ID NO: 4119 - DNA, 70 bp, Homo Sapien
gcctcttctaccttctaactccttgctttctaagccccaggtatctgataacttgattttgtcctgagtc

SEQ ID NO: 4120 - DNA, 70 bp, Homo Sapien
ccatttttaacctcagccttccctactgtcaccaacaaccaagctaaataaagtcaacagcctgatgtgt

SEQ ID NO: 4121 - DNA, 70 bp, Homo Sapien
gtcgaaaacgcgctcttgtcgatttcctgtagtgaatcaggcaccggagtgcaggttcgggggtggaatc

SEQ ID NO: 4122 - DNA, 70 bp, Homo Sapien
ccagtcagtaggaaagtgccacaattgtcacatgaccggtactggaagaaactctcccatccaacatcac

SEQ ID NO: 4123 - DNA, 70 bp, Homo Sapien
ccaaacggtgcaacagaagggtaggttagatgctattaagaaggcacttaatagtacatcatgtaagatg

SEQ ID NO: 4124 - DNA, 70 bp, Homo Sapien
ccatagactcatctagcaccaactaccattagcactatgttaggagctgcaaggccccaaagtagaagat

SEQ ID NO: 4125 - DNA, 70 bp, Homo Sapien
atgggaaacccacgggtacagaggactgaccatattaaagagttagggctactaacctcaaaaagtttct

SEQ ID NO: 4126 - DNA, 70 bp, Homo Sapien
tcagggctccccctgcatcacatcaggaggatgttcatgggagattcatgcccttatctagcagggaagc

SEQ ID NO: 4127 - DNA, 70 bp, Homo Sapien
acattagtatatgcgtccagggtcataaccccctaaaatccatcatgcaaccttattaatctgtcttggg

SEQ ID NO: 4128 - DNA, 70 bp, Homo Sapien
catcatcgaagtcttccccagttataaagaggtcacatagtcgtgtgggtcgaggattctgtgcctccag

SEQ ID NO: 4129 - DNA, 70 bp, Homo Sapien
tcctccagcacctcagggccaataataagaagtggacaatacagtatttgcttcattgtgtgggggaaaa

SEQ ID NO: 4130 - DNA, 70 bp, Homo Sapien
gtaccttgatataccccatcgacctcagcaagcaattagggagaagtacaaggcttcaaagtacctgtgt

SEQ ID NO: 4131 - DNA, 70 bp, Homo Sapien
cttggtactgcagagtctgggttgtagagaactctttgtaagcaataaagtttggggtgatgacaaatgt

SEQ ID NO: 4132 - DNA, 70 bp, Homo Sapien
ttggggtgacctgaagggaaccatcctggtaccccacatcctctcctccgggacagtcaccgaaaacaca

SEQ ID NO: 4133 - DNA, 70 bp, Homo Sapien
tgtacgactggccctacaggtttctgcggcgctttgggcgggacaaggtaaccttttcctttgaggcagg

SEQ ID NO: 4134 - DNA, 70 bp, Homo Sapien
tgtcattgctgttgtccctctgctacgttcctattgtcattaaaggtatcacggtcgccacctggcattc

SEQ ID NO: 4135 - DNA, 70 bp, Homo Sapien
caaagagaacgacgtcacgtccacaacccaaagcctcatgcgataccaggcgacatcatctgtttatttc

SEQ ID NO: 4136 - DNA, 70 bp, Homo Sapien
gtgtgtccatcctggttagtcatatatctcttgtggtctgtccatccaaccatgtgctagatgtcatctt

SEQ ID NO: 4137 - DNA, 70 bp, Homo Sapien
aagactgatccgtcggacagccagacggggttagcggagcaatgcgcaggaataaggaagcgacctgcaa

SEQ ID NO: 4138 - DNA, 70 bp, Homo Sapien
actgcagaggatcgctgagtggggtactgtgtctcatagacatgcgccacctccacgtgagaacaagggt

SEQ ID NO: 4139 - DNA, 70 bp, Homo Sapien
cccagtcccagaaccacactgttgagttggacacactgtaaacccctgggtaactgtcaagtcatgatgg

SEQ ID NO: 4140 - DNA, 70 bp, Homo Sapien
gaccagggaagtagaggcgactcgccgagctctgattgaccgaatggtgaatctgcaccaagcatgaaca

SEQ ID NO: 4141 - DNA, 70 bp, Homo Sapien
ggaagctcatcaaagcccactttgttcgcagtgtagctgaaatactgtctatctctaataaaaacaggag

SEQ ID NO: 4142 - DNA, 70 bp, Homo Sapien
actcctcctcggaagagcccgtcgcgctggacagcttacctagtcttgtagcattcggccttggtgaaca

SEQ ID NO: 4143 - DNA, 70 bp, Homo Sapien
gcgggtgacatttgtaacatttcctctttgagactctgagttcacctagagaagtctaagcataacagct

SEQ ID NO: 4144 - DNA, 70 bp, Homo Sapien
actttgtggtcttctcctctgtgagctgcgggcgtggcaatgcgggacagagcaactacggctttgccaa

SEQ ID NO: 4145 - DNA, 70 bp, Homo Sapien
gtaatttgtgtctagttattcagaggagtaagatggtgatgttcacctggcaatcagctgagttgagact

SEQ ID NO: 4146 - DNA, 70 bp, Homo Sapien
catatctgagagcgttccagagccgatcgtggaatgggtgctttgcgattcacagggggaaagctgtaaa

SEQ ID NO: 4147 - DNA, 70 bp, Homo Sapien
cccagtggtaaatcccttagatcccctgctggtctctggcagtctccttgattttgggtaccatgtatat

SEQ ID NO: 4148 - DNA, 70 bp, Homo Sapien
caaagtggtcgtggggattgtgctatggaacatctttaaccgaatgccaatagcaaggaagatcattaag

SEQ ID NO: 4149 - DNA, 70 bp, Homo Sapien
gatcccgcaaccgaggagcctaggggagagctttagtgacaaggtcatgagatggttccaggccatgctg

SEQ ID NO: 4150 - DNA, 70 bp, Homo Sapien
gccaaagttttcaaactgctgcatactttgacaaggaaaatctatatttgtcttccgatcaacatttatg

SEQ ID NO: 4151 - DNA, 70 bp, Homo Sapien
aggaattgtcgaaaccgtggaaatctatttagctgaaatctagccagtgtgtagacaatgttgaaatttt

SEQ ID NO: 4152 - DNA, 70 bp, Homo Sapien
atcatcagagagatgatccgtctcctggatcagggtttaaacatcccagagaaaggggaagttgctgact

SEQ ID NO: 4153 - DNA, 70 bp, Homo Sapien
gggcctcatgtcaactacagccagctgactcacttcatgcagtgcaccgaggacaacacccactttgagg

SEQ ID NO: 4154 - DNA, 70 bp, Homo Sapien
agttctattctgcccacttattccagaatggcagtgtattagtaggagagctctacagctatggaacatt

SEQ ID NO: 4155 - DNA, 70 bp, Homo Sapien
caccaacgatgaggcatacgctgaggagtttggcaacgagacgtggggcgtaacaaaggcagcagagaaa

SEQ ID NO: 4156 - DNA, 70 bp, Homo Sapien
accatggagaccatagactggaaggtctttgagagctggatgcaccattggctcctgtttgaaatgagca

SEQ ID NO: 4157 - DNA, 70 bp, Homo Sapien
gtgtggtatgcccaaaatggaaaagaggctattcagagtggtcagggagcttagaggagcgtaaaggaga

SEQ ID NO: 4158 - DNA, 70 bp, Homo Sapien
gaatgcacgtccaagaatacggctctgattgcccccctccaaacacgaggcgtgtgtacatttcttatct

SEQ ID NO: 4159 - DNA, 70 bp, Homo Sapien
tgagcatgacttccgttggactgatggcagcacactgcaatacgagaattggagacccaaccagccagac

SEQ ID NO: 4160 - DNA, 70 bp, Homo Sapien
atggtgaacttctacaacaattacatttcctgcaccaacaaggccaacctgtcccaagtggccggtaggt

SEQ ID NO: 4161 - DNA, 70 bp, Homo Sapien
atacccttgacaaatactgtgaccgggagtatgctgtgaagacccaccaccacttgtgttgccgccaccc

SEQ ID NO: 4162 - DNA, 70 bp, Homo Sapien
taaggtacttggttatccagtgcagtgcaccggaataaagagaatttgtaggcgtatacagctttaaatg

SEQ ID NO: 4163 - DNA, 70 bp, Homo Sapien
tggccatcaaagtgttgagggaaaacacatcccccaaagccaacaaagaaatcttagacgaagcatacgt

SEQ ID NO: 4164 - DNA, 70 bp, Homo Sapien
gaacgagcgcagagttatcgtgccagcagatcctacgctatggagtacagaccatgtgcggcagtggctg

SEQ ID NO: 4165 - DNA, 70 bp, Homo Sapien
tgtgaagaggttcgcagggataaggggtgcactttatagctatggaaacatgagattctcctctattgga

SEQ ID NO: 4166 - DNA, 70 bp, Homo Sapien
tagagattatgacgttgcagccccgctgcgaggacgtagagacggccgagggggtagctttaactgtgac

SEQ ID NO: 4167 - DNA, 70 bp, Homo Sapien
tctctgaagccacaaataggatgcttgggaagactcctagctgtcctttttcctctccacacagtgctca

SEQ ID NO: 4168 - DNA, 70 bp, Homo Sapien
tttgctgggtagtggagggggtaagctaaatcatagtttctgacaataactgggaaggttttttcttaaa

SEQ ID NO: 4169 - DNA, 70 bp, Homo Sapien
tgctgtgcattgcaggatggtgagcagcgtccctctcatgtgacacccacagttatgccggatgttgcca

SEQ ID NO: 4170 - DNA, 70 bp, Homo Sapien
tggtgggggtgcagatgaggttgctagagaatgttagaggatccctctctggattggagatagggaaaga

SEQ ID NO: 4171 - DNA, 70 bp, Homo Sapien
cagttctgaggccctatgccatccataaggattccttgggattctggtttggggtggtcagtgccctctg

SEQ ID NO: 4172 - DNA, 70 bp, Homo Sapien
cagcccacatagtgatggttcccctgttcactctacttagcatgtccctaccgagtctcttctccactgg

SEQ ID NO: 4173 - DNA, 70 bp, Homo Sapien
aagaattgcaggcatatgggatgtaagatgttctttcctatatatggtttccaaagggtgcccctatgat

SEQ ID NO: 4174 - DNA, 70 bp, Homo Sapien
taaggtggacgttttgaccgagtcgatgcgccgttcttgtgcctgtctacctgcgcgtttgctgtacgcg

SEQ ID NO: 4175 - DNA, 70 bp, Homo Sapien
tttaatgtagtactctgcttctgtatccccgaggtgagtcagaaaaatttcaagttgccacgccttggcc

SEQ ID NO: 4176 - DNA, 70 bp, Homo Sapien
tacccacacctctgccagaagatcccctcaggactgcaacaggcttgtgcaacaataaatgttggcttgg

SEQ ID NO: 4177 - DNA, 70 bp, Homo Sapien
atttcccccctcaagaccatatcagcttctctggggtcaagactgacaatcccgtgtaaggtgtttctgg

SEQ ID NO: 4178 - DNA, 70 bp, Homo Sapien
ccgaacactttcatactaagactgtaagtagatctcagttctgcgtttattgtaagttgataaaaacatc

SEQ ID NO: 4179 - DNA, 70 bp, Homo Sapien
ttctctaaaagcacctacatcattgcttctacgcttgacgtggctctgagctcccaatctcctgggacag

SEQ ID NO: 4180 - DNA, 70 bp, Homo Sapien
tgtcagtgagagatgttggaatatatggtccaatgaagcacatccctcgcgcccgacccgccctggcagt

SEQ ID NO: 4181 - DNA, 70 bp, Homo Sapien
acagactgtgtcggagcggaaaaactggtgtgctctcatcactgagactgccggatccctgaaagtccct

SEQ ID NO: 4182 - DNA, 70 bp, Homo Sapien
aacaaaaagcgactgtgccaattccatcggtaccccacgagcatcgcatcacttgccttcagtaatgatg

SEQ ID NO: 4183 - DNA, 70 bp, Homo Sapien
aagtccttaagttccaactctatttttgatccggattacatcaaggagttggtgaatgatatcaggaagt

SEQ ID NO: 4184 - DNA, 70 bp, Homo Sapien
catctttaaaatgaataggtaggttagtagcccttcagtcttaatactttatgatgctatggtttgccat

SEQ ID NO: 4185 - DNA, 70 bp, Homo Sapien
tttatttaccaactttgcaataacagaaagtccttccgccttcgtcgcagagacctcttgctgggtttca

SEQ ID NO: 4186 - DNA, 70 bp, Homo Sapien
tctcctgctctcataatgaagacatagccgattctctgcccgggccccttgctgatgctcctccgggtct

SEQ ID NO: 4187 - DNA, 70 bp, Homo Sapien
ggttcccttctctcaatgtttgtaataattgctcataagcaataccagcaattcataaaaactgcttact

SEQ ID NO: 4188 - DNA, 70 bp, Homo Sapien
ttggtgcatagcagatggtttccacatttagatcctggtttcataacttcctgtacttgaagtctaaaag

SEQ ID NO: 4189 - DNA, 70 bp, Homo Sapien
ttcctgtggcaagtccacagtccgagtgcagaaggccatctgcagtgggttcttccgtaatgctgccaag

SEQ ID NO: 4190 - DNA, 70 bp, Homo Sapien
catcttgtgtgatgttttacacacatgagggctggtgttcattaatactgttttctaatttttccatagt

SEQ ID NO: 4191 - DNA, 70 bp, Homo Sapien
gagtgagttgaaccaggtggaccaagtgggctacgtgacctatgacatcctgcagtgccctgaggactag

SEQ ID NO: 4192 - DNA, 70 bp, Homo Sapien
aatctgccaaggtgcccacagcagagcctcccggagaagtggcagtatcagagtccaccagagaagagca

SEQ ID NO: 4193 - DNA, 70 bp, Homo Sapien
aggagtagggccattgctagcccgtctctcactttggtgaaatttagaaaaaggcggttccttttagaaa

SEQ ID NO: 4194 - DNA, 70 bp, Homo Sapien
ccagctgattagtgtctaaggaatgatccaatactgttgcccttttccttgactattacactgcctggag

SEQ ID NO: 4195 - DNA, 70 bp, Homo Sapien
ctcaaattaaagggagacatagattcaaatgcagctattgatcttagcaacaaagcttcattagcattct

SEQ ID NO: 4196 - DNA, 70 bp, Homo Sapien
aattgcccaaggaacgctcgagtctgcttgctgtgtccaacaaatatggtctggtcttcgctggtggagc

SEQ ID NO: 4197 - DNA, 70 bp, Homo Sapien
agaggtctagacgtgagatccgcgtcgggacagggttttaagtgacaaagaagggcgagtggcttctctg

SEQ ID NO: 4198 - DNA, 70 bp, Homo Sapien
tacctgaggccatagctgccctattcacttctaagggccctgttttgagattgtttgttctaatttattt

SEQ ID NO: 4199 - DNA, 70 bp, Homo Sapien
gggtctgcggttgaagctatgttccttcgttcagctgagattttcaataagaaacttccgtctgggcatt

SEQ ID NO: 4200 - DNA, 70 bp, Homo Sapien
tgatagaaatggtttcctctggatcgttttatgcggttcttacagcacatcacctctttccccccgacgg

SEQ ID NO: 4201 - DNA, 70 bp, Homo Sapien
gatgtctacactgccagagagaccgtgaggatgaaattaatagtggggcctttgtgagctagaggctggg

SEQ ID NO: 4202 - DNA, 70 bp, Homo Sapien
aggaggggagaggtgggccgtaacgggcacggatcacgatgtaaattattaagcattttggttggatttc

SEQ ID NO: 4203 - DNA, 70 bp, Homo Sapien
gtgaatgtatatagtctttgcagaggtccaaatgatattcatgatggtaataaacgagatgtttgccaaa

SEQ ID NO: 4204 - DNA, 70 bp, Homo Sapien
tttttatataccacgccacccatggggggtcttaacacgtgggggggcacccgataagcagctttcggta

SEQ ID NO: 4205 - DNA, 70 bp, Homo Sapien
cctgaagcccgatgacatcttacgaggtggacgttggactgttcatgcgcatcgggtgtcagtgactcat

SEQ ID NO: 4206 - DNA, 70 bp, Homo Sapien
acaatcagtggtgataggcttactcatcaaatcatggatctcaaccttgatactatgtattactttcgaa

SEQ ID NO: 4207 - DNA, 70 bp, Homo Sapien
cgtggactcttcggagaactttcagatctcccttaagagcaaacaaggcccgatcgatgttttcctgtgc

SEQ ID NO: 4208 - DNA, 70 bp, Homo Sapien
tctttaatgttgccaaacgctgccagtatttcatccgcctcacccttctcatctcggtccccgtccctgt

SEQ ID NO: 4209 - DNA, 70 bp, Homo Sapien
atggggttcagcctaacagttatggaaactacagtccttataaaccattggcatggtaataaacagatct

SEQ ID NO: 4210 - DNA, 70 bp, Homo Sapien
catccactactcaattatagatggcaaccaaggaagctcgttcacaattgaccccgtcaggggagaagtc

SEQ ID NO: 4211 - DNA, 70 bp, Homo Sapien
ttcagaaagagctcactatcatcaagagaaaactcacatagtgacaggatggcgccaaactcagccttca

SEQ ID NO: 4212 - DNA, 70 bp, Homo Sapien
gctcatcaccaagggccgaatcccctacccaggcatgaataaacgggaagtgttggaacaggtggagcag

SEQ ID NO: 4213 - DNA, 70 bp, Homo Sapien
tgtaatgttactgatcatgcattgttgaggtggtctgaatgttctgacattaacagttttccatgaaaac

SEQ ID NO: 4214 - DNA, 70 bp, Homo Sapien
agagtgagaaccaagtgactccctaggcttcggacacaaataggctcctctacacctgaagacaaaggca

SEQ ID NO: 4215 - DNA, 70 bp, Homo Sapien
cttttcttttcctctggatttttgttcctcctgtacaagaggtgtctttgcttggtttggtggggctgcg

SEQ ID NO: 4216 - DNA, 70 bp, Homo Sapien
caccgttcactattgtagagtaacccctgtgactcaatattaccatagtgcgatgtcgttttgtgctatt

SEQ ID NO: 4217 - DNA, 70 bp, Homo Sapien
tgctctgtagtatcctgtgtccataccagcctgtttctacattaaacacctatactcagcctgaagcccc

SEQ ID NO: 4218 - DNA, 70 bp, Homo Sapien
tttcttcagtgtctacatattatgtcacacgttctatttgcactgctgcaatatagatcaaagatcttgt

SEQ ID NO: 4219 - DNA, 70 bp, Homo Sapien
tgtgctgctgatctgggcctgaataagggttatcgaatggtggtgaatgaaggttcagatggtggacagt

SEQ ID NO: 4220 - DNA, 70 bp, Homo Sapien
cccacatgtgacacatatgcaccttgtgtctgtacacgtgtcctgtagttgcgtggactctgcacatgtc

SEQ ID NO: 4221 - DNA, 70 bp, Homo Sapien
tgatgcaagatggccagcactgaacttttgagatatgacggtgtacttactgccttgtagcaaaataaag

SEQ ID NO: 4222 - DNA, 70 bp, Homo Sapien
aggagtactgtctcatctcatcatattcacgggttctggagattagctcattgaaagtgggaggggcatt

SEQ ID NO: 4223 - DNA, 70 bp, Homo Sapien
aagccaggaaggcctatgtgaacatgtcgctgtttgagaacttcacttacgcgggcattgatgccacagc

SEQ ID NO: 4224 - DNA, 70 bp, Homo Sapien
ggattggggtgtccaaactgcatcgagtatttcacctcccaagggttacagagcatttaccacctgcaga

SEQ ID NO: 4225 - DNA, 70 bp, Homo Sapien
accctttgctattcaccgtcagcatatgagccgaatgctgtccggtggctttggatatagccccttcctc

SEQ ID NO: 4226 - DNA, 70 bp, Homo Sapien
ccccacgggagcattgtagcacgcgctgtatggttgtgcgttgtagcgtgcgctgtatagttgtgatgcc

SEQ ID NO: 4227 - DNA, 70 bp, Homo Sapien
atgtttcctggggtgacttaacaaggaataatcccacaatatacctagctacctaatacatggagctggg

SEQ ID NO: 4228 - DNA, 70 bp, Homo Sapien
cctgttgagtgacagtgtttcgcagctgagcccttaaggagattctcagttgggcagagacatcccttcc

SEQ ID NO: 4229 - DNA, 70 bp, Homo Sapien
cctcggatgctggggtctacatttgcacctgccgtaatctccaccaatccaataccagccgggcagagct

SEQ ID NO: 4230 - DNA, 70 bp, Homo Sapien
tcctatacctctatctgtcgtgcttaaacctctgctgctcgcgtactcgtcaccgtgcgcatcagtgagc

SEQ ID NO: 4231 - DNA, 70 bp, Homo Sapien
cccatctcccggccaaagctggtgccactgtctcagacccccttgtgagatctccagcacagaatgttct

SEQ ID NO: 4232 - DNA, 70 bp, Homo Sapien
gtattttatgatagggataattcaggtcctaattttggtgttatttaaagggaccttattttctgcccct

SEQ ID NO: 4233 - DNA, 70 bp, Homo Sapien
gatcaagcgccagaatggagatgatcccttgctgacttaccggttcccaccaaagttcaccctgaaggct

SEQ ID NO: 4234 - DNA, 70 bp, Homo Sapien
agtgacaaatcattccacacgataccccttgcattccagtagcgaaggttgttaccgccctcctaccctt

SEQ ID NO: 4235 - DNA, 70 bp, Homo Sapien
tagggaactgcctagtgtaacaatgaaaccagatttctcacttgctcttcatacttctattttgaggtaa

SEQ ID NO: 4236 - DNA, 70 bp, Homo Sapien
tccatttttaatcccgccaacgcacaatctccggaggaatgcccacgagctctcgcgttggtggcgttta

SEQ ID NO: 4237 - DNA, 70 bp, Homo Sapien
gagcatctggagggaattgtcaatatcttccaccaatactcagttcggaaggggcattttgacaccctct

SEQ ID NO: 4238 - DNA, 70 bp, Homo Sapien
ccacgatgctctgatttaattctagaaacaatttgattacctcttgtttgtgacaagactaagcattaag

SEQ ID NO: 4239 - DNA, 70 bp, Homo Sapien
aggagggccgagacaggagcagcccacccagcagaaatacaatccgagctacaaagcatgggaaaaagag

SEQ ID NO: 4240 - DNA, 70 bp, Homo Sapien
taaaaacttggaagaagcttcaaagctcttggaggctttaaagttctttctgttgggtgtgcattacagt

SEQ ID NO: 4241 - DNA, 70 bp, Homo Sapien
tgtgtgggtagagaccatcctttccctgcatattaggccagcttgtgccatataccagtgtggtgtctgt

SEQ ID NO: 4242 - DNA, 70 bp, Homo Sapien
attcccacttgccccagagaagctactcggccaaacctagccagggtctgttcttgtggaccagagccag

SEQ ID NO: 4243 - DNA, 70 bp, Homo Sapien
attaaagagggtgtacgggagtttcttggtaaatccagaatcaggatacaatgtctctttgctatatgac

SEQ ID NO: 4244 - DNA, 70 bp, Homo Sapien
attgaccagctaggctatttagtcccatagtagttcagatctgcttagatgtgacaggcattgaaggctg

SEQ ID NO: 4245 - DNA, 70 bp, Homo Sapien
tgtagtaacatgcagccgaaactcatgctgagacgcacggagtccgtcgtcgaaaaactcctcacaaact

SEQ ID NO: 4246 - DNA, 70 bp, Homo Sapien
actgtgatcggaggaagtgcacccgccgtttttgttcagtctacccactctcagggtaacaatgcctcag

SEQ ID NO: 4247 - DNA, 70 bp, Homo Sapien
actttgggctgatgcgagcactacctcagaatgacgaccattacgtcatgcaggaacatcgcaaggtgcc

SEQ ID NO: 4248 - DNA, 70 bp, Homo Sapien
ttgtgagtatgccttaaattctatggggacaaggtaagaggacaagcaaatgaaagctcagagagacaaa

SEQ ID NO: 4249 - DNA, 70 bp, Homo Sapien
gaattgaccagcggctgttacactgttctttgccactgtgcctatgctcagaatatgctcactgctaagc

SEQ ID NO: 4250 - DNA, 70 bp, Homo Sapien
taatagaaaaagtcgaacacgctacagctaacttcttccgttatgagagcttgagactgcgccgccgctc

SEQ ID NO: 4251 - DNA, 70 bp, Homo Sapien
aggccggacccatttgggatctacgtcttatgatgaatccactgtccggtcagaatagagggtatgcatt

SEQ ID NO: 4252 - DNA, 70 bp, Homo Sapien
gtagccatatgttacagatctcagcaccgatcagaactgtaaagctataatccccagaattaaagttttt

SEQ ID NO: 4253 - DNA, 70 bp, Homo Sapien
ccacactaaggaatcgtaccttctcagagtcttcggtttggtctcaacaatcttctagaccctccttgaa

SEQ ID NO: 4254 - DNA, 70 bp, Homo Sapien
ttatgtagtagtatgatacctgtacttaagcatcactcaagggtaagtgttctaggaaggttgatttagc

SEQ ID NO: 4255 - DNA, 70 bp, Homo Sapien
ggcgtgttcatccccacaccgtgtgtcacaacaggctagggcacttcacgatgtcactacttgtttttct

SEQ ID NO: 4256 - DNA, 70 bp, Homo Sapien
tcctgctattctgaaattgcctacatgtttcaataccagttatatggagtgcttgaatttaataagcagt

SEQ ID NO: 4257 - DNA, 70 bp, Homo Sapien
gggctttgaggctgtctaccagttgacccgaatgtgcaccatccgcatgagcttcgtcaaaggctgggga

SEQ ID NO: 4258 - DNA, 70 bp, Homo Sapien
gctgttcaggctatcgagactcatttgatccgcaagtctagcagcggactaacttatatcgcagagtgga

SEQ ID NO: 4259 - DNA, 70 bp, Homo Sapien
ctggtgcttatgctcttaattgccacctctaacagcaccaaatcaaaatctctccactttcagctgtctt

SEQ ID NO: 4260 - DNA, 70 bp, Homo Sapien
attatacactattggatgttctctactatgttacacgtgatgacttaaaatgcttgagactaaggggagg

SEQ ID NO: 4261 - DNA, 70 bp, Homo Sapien
cacccttttctcgccgcaagaagcccattcctatggaagtctagcaaagcaatacgactcagcccagcac

SEQ ID NO: 4262 - DNA, 70 bp, Homo Sapien
gagaagataaagcttaccaacttgagcggcatcgaatagaggcagctatggaccgaaagtctgatagtga

SEQ ID NO: 4263 - DNA, 70 bp, Homo Sapien
ggaggcaaatatgagcatacaatccctttgttctaaagatattgttccagctagtggaatgatgttgaat

SEQ ID NO: 4264 - DNA, 70 bp, Homo Sapien
gcagaattccgtttttcaccggggcgtggctaccctgtcgtgacgcgtttccgcgtattgtcccctataa

SEQ ID NO: 4265 - DNA, 70 bp, Homo Sapien
ttctgcccattcgcgacatccgcgccagcgttggggctggttttctgtaccccttagtaggaacgatgag

SEQ ID NO: 4266 - DNA, 70 bp, Homo Sapien
gtgaaaacatcaccaatgcccctgaactgcagccgaatgctgtcacttggggcatcttccctgggcgaga

SEQ ID NO: 4267 - DNA, 70 bp, Homo Sapien
gcgttattgatgggcattaatctatgttagttggcaccttaagatactagtgcagctagatttcatttag

SEQ ID NO: 4268 - DNA, 70 bp, Homo Sapien
cctttctgagtgacatgggtgtgccaggctagactaggaggttccggtgtctggaaaagcactttacaga

SEQ ID NO: 4269 - DNA, 70 bp, Homo Sapien
tacagcatattcttcacgcagagattttcatctattatactttatcaaagattggccatgttccacttgg

SEQ ID NO: 4270 - DNA, 70 bp, Homo Sapien
tctaaccaaccgtgatgccacgtaacttaccctatggacaaaagcaggaatgactaacacatcctaggag

SEQ ID NO: 4271 - DNA, 70 bp, Homo Sapien
ggtgtgtggagattctaatcccaacaagcaagggtctccttcaagattaatgctatcaatcattaaggtc

SEQ ID NO: 4272 - DNA, 70 bp, Homo Sapien
gcagatattactgcacaaactgccatctcgcttcatttttttaactatgcatttgagtacagactaattt

SEQ ID NO: 4273 - DNA, 70 bp, Homo Sapien
tccacttgacagtcatcaatagattggtttaaattgtgatcttttttccttcccgcagcgtgagtgcatc

SEQ ID NO: 4274 - DNA, 70 bp, Homo Sapien
ctttgtgataattctcagtagttgtccgtgataatcgtgtcctgaaaatcctcgcacacactggctggtg

SEQ ID NO: 4275 - DNA, 70 bp, Homo Sapien
ccaccacttacaagctggctgttgaaatgagagcggtttcttacagtctacccggcgttgtggcacatgc

SEQ ID NO: 4276 - DNA, 70 bp, Homo Sapien
ggagcagattgctaaagttgatagagaatatgaagaatgcatgtcagaagatctctcggaaaatattaaa

SEQ ID NO: 4277 - DNA, 70 bp, Homo Sapien
tgttatggagggagcagcctcacacaagcagaaacactcctgtggatggtattgtagcatgtattgttta

SEQ ID NO: 4278 - DNA, 70 bp, Homo Sapien
cacctgagctataccaacagtctcctaaattatttgctagacacatggctatttggatttaaattaatac

SEQ ID NO: 4279 - DNA, 70 bp, Homo Sapien
gccgctcccacacagcaagaggactcatggacgtctctagaacatatcttgtggccatttaccagactcc

SEQ ID NO: 4280 - DNA, 70 bp, Homo Sapien
tcaagaccttcccctaccttttgtggaaccagtgatgcctcaaagacagtgtcccctccacagctgggtg

SEQ ID NO: 4281 - DNA, 70 bp, Homo Sapien
aaacaaagagctgcgagctgaagctgaacggctgggccatgagctacagcaggctgggctgaagaccaag

SEQ ID NO: 4282 - DNA, 70 bp, Homo Sapien
tgggacatgcatgctatggggaccctcttgttggacacctaattggatgcctcttcatgagaggcctcct

SEQ ID NO: 4283 - DNA, 70 bp, Homo Sapien
ggaacaatacgtcatatatttggaacagttattgtctgtgccatgaccttcatgataccagtgagaagcc

SEQ ID NO: 4284 - DNA, 70 bp, Homo Sapien
aatcaggagtcaaaattcatcgtcttcaagcccctctttctagccttttctactactctctgcttggtca

SEQ ID NO: 4285 - DNA, 70 bp, Homo Sapien
ttgggcaagtttggatgcatctactcaaaccacccatgaactcaccattccaaataacttaattggctgc

SEQ ID NO: 4286 - DNA, 70 bp, Homo Sapien
cagaaatcctgacactcaagacatacctgcatacatatgagagcgagatttaactttctgagcatctgca

SEQ ID NO: 4287 - DNA, 70 bp, Homo Sapien
tttaaaaaactcctgtcttgctagacaaggttgctgttgtgcagtgtgcctgtcactactggtctgtact

SEQ ID NO: 4288 - DNA, 70 bp, Homo Sapien
tggcacattttcagcgttggctgagttacatgtacagtgcttaggccacctgggggagagtaagagtggg

SEQ ID NO: 4289 - DNA, 70 bp, Homo Sapien
actgtcaggcgccctacgactcctctgccatcgagatgacgctggtggaagttctacagaagaagctgat

SEQ ID NO: 4290 - DNA, 70 bp, Homo Sapien
aggtttgtaggagactgagttgttagcaggtgtgcttagctcttgatagtgaacgtgtaccttgggaact

SEQ ID NO: 4291 - DNA, 70 bp, Homo Sapien
aaactcacaacctaaagcccaatcttgaaaatatgttgtgcaccaagacgactgcttcagcttcttctct

SEQ ID NO: 4292 - DNA, 70 bp, Homo Sapien
acacaacccgcgttgtgaataattggttgtttgggccggtgaatacaccggccacgcaacaagtttacca

SEQ ID NO: 4293 - DNA, 70 bp, Homo Sapien
gaaaggagcaacacactgcccctaggcgtgcgtgtggcccagtttctctctgctctccattaagtgcatt

SEQ ID NO: 4294 - DNA, 70 bp, Homo Sapien
catgtaatattcttagaattgagattgctacacggagcagtccttgacgatcgtgtttctgacgtttctc

SEQ ID NO: 4295 - DNA, 70 bp, Homo Sapien
ctgtagcaaggttctactgttttcagtttcatattacccctatatgcatcaaagctgcaacttcccttgc

SEQ ID NO: 4296 - DNA, 70 bp, Homo Sapien
ctgcccaagccctgtcttaaggcccagggggaggttaggagactgatagcatgtgatggctcaggctgaa

SEQ ID NO: 4297 - DNA, 70 bp, Homo Sapien
cttggtggaattggctacttctacggacaagggctggtattgccagacatcggggtggaagggtctgagc

SEQ ID NO: 4298 - DNA, 70 bp, Homo Sapien
agccacaaacccaagcgaggaccaggacacaccacagccgatgtcgacacaaaactcagacgcaaagcaa

SEQ ID NO: 4299 - DNA, 70 bp, Homo Sapien
tagtttgctttttgcgtacacagagaaggctatgtaaacaaaccacagcaggatcgaagggtttttagag

SEQ ID NO: 4300 - DNA, 70 bp, Homo Sapien
aaactcttagaaagtttgcctgacgttcggaaccaagcagacgttatttacgtcaatacacagttgctgg

SEQ ID NO: 4301 - DNA, 70 bp, Homo Sapien
agcggcagtcctggaggctaccagacttactgagttctacctgagaaacagccaagcaaagtgtgagaga

SEQ ID NO: 4302 - DNA, 70 bp, Homo Sapien
ggtccccgagtacgatacaacccctataccacccgacctaaccgtcggggtgatacttggcatgatcgag

SEQ ID NO: 4303 - DNA, 70 bp, Homo Sapien
ggtcgtgttgccttagggcccccatgtcagtgccgtcatctagactgattatgcccgcagtgatcctgtc

SEQ ID NO: 4304 - DNA, 70 bp, Homo Sapien
gcactttgttcactgtcctgtgtcagagcactgagctccacccttttctgagagttattacagccagaaa

SEQ ID NO: 4305 - DNA, 70 bp, Homo Sapien
ctgagataatacaatcatttccaccgcttgactcacttaacttgcccctgccaccagtagattttatgaa

SEQ ID NO: 4306 - DNA, 70 bp, Homo Sapien
tgaacagctctgacccccatggcatcgagagcaaacggcggaagaaaaagccggccatcctggaccactt

SEQ ID NO: 4307 - DNA, 70 bp, Homo Sapien
caagggattagaccacctatggctggatgcaacagttcggtaggcggcatgagtatgtcgccaaaccaag

SEQ ID NO: 4308 - DNA, 70 bp, Homo Sapien
ttttgtccatttgagattctgcactccatgaaaagttcacttggacgctggggccaaaagctgttgattt

SEQ ID NO: 4309 - DNA, 70 bp, Homo Sapien
gtgtattgcttttaagagagccatcagttagctatcagactctaggttgatgcattttgtacttagctgt

SEQ ID NO: 4310 - DNA, 70 bp, Homo Sapien
gacgtggacaacttgtgtacctaagtgaccgccccacctgtggcttatacgtggcgtggcctctttcttc

SEQ ID NO: 4311 - DNA, 70 bp, Homo Sapien
accttcaagtgacttccattatggctggacaggcggtgagctcagtggattgcagtggtgtgctggtgat

SEQ ID NO: 4312 - DNA, 70 bp, Homo Sapien
tctgcggaccgggtgaccgtgcttctgtggaatgggtgaatatacttctgcggaccaggtgactatgctt

SEQ ID NO: 4313 - DNA, 70 bp, Homo Sapien
aagactctggactcattgctgattggaacaccaggaggaggttggatttctgccagtgggggatgtttct

SEQ ID NO: 4314 - DNA, 70 bp, Homo Sapien
caccatcttgtcgcgcttcgacatgatcttcatcgtcaaggatgagcacaatgaggagagggatgtgatg

SEQ ID NO: 4315 - DNA, 70 bp, Homo Sapien
cgatggtttgcccactatgacgtgcaaagcctgctctttgattgggctccgaggtctcaggggatgggga

SEQ ID NO: 4316 - DNA, 70 bp, Homo Sapien
gcagatgggtgccctgaatggaactactttaactaatccatagggacttctggtatgctttcctctcttt

SEQ ID NO: 4317 - DNA, 70 bp, Homo Sapien
gagaatgaaaaacgaggaattggagatatgaatatcgaaaactcaagagttttgccttaaagagaaacag

SEQ ID NO: 4318 - DNA, 70 bp, Homo Sapien
cacaactgggtcaacgctttaggctgagtcactcctcgggtctctccataattcagcccaacaatgcttg

SEQ ID NO: 4319 - DNA, 70 bp, Homo Sapien
tgcagcgcttgcggacagtcgattcctgcgagtgaactcgtcatgagggcgcaaggcaatgtgtatcatc

SEQ ID NO: 4320 - DNA, 70 bp, Homo Sapien
aagtgtttaccgccacaagatcttttttgtggccgtgatccagacggaggtcccccctctgtttgtcatt

SEQ ID NO: 4321 - DNA, 70 bp, Homo Sapien
tttgagtcttctctataagtctagtgttcatggaggtagcattgaagatatggttgaaagatgcagccgt

SEQ ID NO: 4322 - DNA, 70 bp, Homo Sapien
aaggggagtccttgggttctttcaaaaaattcgtgaggagagctgtctacagtggaatagggggtctccc

SEQ ID NO: 4323 - DNA, 70 bp, Homo Sapien
cctgtttcccggtctcgctatcaagatccaacgcagtaatggtttaattcacagtgccaatgtaaggact

SEQ ID NO: 4324 - DNA, 70 bp, Homo Sapien
gcagtacatgaatcgaaaaggtggattcaacagacctttggatttcattgcatgagaattgaagtgttga

SEQ ID NO: 4325 - DNA, 70 bp, Homo Sapien
tcccaagtgctcttattctggtgagaagaaccttacttccataatttgggaaggaatggaagatggacac

SEQ ID NO: 4326 - DNA, 70 bp, Homo Sapien
tggagactggcggcgtgatcgggatcgactttgggcatgcgtttggatccgctacacagtttctgccagt

SEQ ID NO: 4327 - DNA, 70 bp, Homo Sapien
tggatatcatcgatctaggtcaaggtcacccccttacagacgctatcattcacgatcaagatctcctcaa

SEQ ID NO: 4328 - DNA, 70 bp, Homo Sapien
tggaatcacccctagatctttcttgaagacttgaattagattacagcgatggggacacagaaggtcaccc

SEQ ID NO: 4329 - DNA, 70 bp, Homo Sapien
agagcacggactttgaagagcggaagctcatccgggctgcacttcgtgagctccgacaaaggaagagaga

SEQ ID NO: 4330 - DNA, 70 bp, Homo Sapien
ccatgttaatatgcaagtatactagcagaaaaattgggccatagtatcgtggatttccaggtattttctg

SEQ ID NO: 4331 - DNA, 70 bp, Homo Sapien
tgtacagctggaaacgctgagtattcgaggaaataacattcggtattttattctaccagacagtttacct

SEQ ID NO: 4332 - DNA, 70 bp, Homo Sapien
ggccggcagcggcagaagtggggcatgactattcgatttgactcaagcttcagtagactcagaagaagct

SEQ ID NO: 4333 - DNA, 70 bp, Homo Sapien
tccgtgttcgtactcccttttgtatgtttctactgttaatgccatattactatgagataatttgttgcat

SEQ ID NO: 4334 - DNA, 70 bp, Homo Sapien
tggtcatcatgaaccaggtgagcaatgcctacctataccgcaagaggatccaaccatgagctcttcccag

SEQ ID NO: 4335 - DNA, 70 bp, Homo Sapien
gccctaaaccgagatttcagtctaccttaccaatggggcatctggctaaacaacctgacaaactgtggcc

SEQ ID NO: 4336 - DNA, 70 bp, Homo Sapien
aaatacgagaaacagatcaagcactttggcatgcttcgccgctgggatgacagccaaaagtacctgtcag

SEQ ID NO: 4337 - DNA, 70 bp, Homo Sapien
cctgttctcggcaccttaaattattagaccccggggcagtcaggtgctccggacacccgaaggcaataaa

SEQ ID NO: 4338 - DNA, 70 bp, Homo Sapien
gagatgtgtacgcttatgtcggtgtcccaacgtataaactatcacagtagcgctcatggctcgtaggttt

SEQ ID NO: 4339 - DNA, 70 bp, Homo Sapien
ataggttgctgtcagactatacccatggtgcctctgggcttgacaggtcaaaatggtccccatcagcctg

SEQ ID NO: 4340 - DNA, 70 bp, Homo Sapien
tcatcctaataatgggatgagggaagtttccagcagatttcaggctgttcttaaagtttttgttggtcat

SEQ ID NO: 4341 - DNA, 70 bp, Homo Sapien
ggaggttctggaatgggaggctacggaagagatggaatggataatcagggaggctatggatcagttggaa

SEQ ID NO: 4342 - DNA, 70 bp, Homo Sapien
ttaggtgtatcaaaccgaatgataaaaaagcagcacacatcttcaacgaggctctagtgtgtcatcagat

SEQ ID NO: 4343 - DNA, 70 bp, Homo Sapien
ttccataaggggggcttacacagttgccctaatgcggctggaatccccattgggggtaggtgagcaggca

SEQ ID NO: 4344 - DNA, 70 bp, Homo Sapien
gaaactgctcttattgtgccaatatgccctccaaaccctcccaggattcaaagctaggtttggctgtctg

SEQ ID NO: 4345 - DNA, 70 bp, Homo Sapien
acacgaaaaaagaaatttgccttgtccctttgtgtacaaccatgcaaaactgtttgttggctcacagaag

SEQ ID NO: 4346 - DNA, 70 bp, Homo Sapien
gaggcataaacagaaccagtcactatggaggtcgaggattcccatgtgggcccttcagcttgggctgctt

SEQ ID NO: 4347 - DNA, 70 bp, Homo Sapien
tgagatatccaggagattcattaggtcatcagcgatcaaaggttagcattttattatagatgttcactgt

SEQ ID NO: 4348 - DNA, 70 bp, Homo Sapien
tgttctacaggggcaaacagatggaggacggccataccctcttcgactacgaggtccgcctgaatgacac

SEQ ID NO: 4349 - DNA, 70 bp, Homo Sapien
ttgttctattgcctgacctgatgaactgttaatatctggtgaggttgagttatcatgctactaatatttt

SEQ ID NO: 4350 - DNA, 70 bp, Homo Sapien
gcggtagatgaggtacttggatcctccttttgtcttcacctcgatgacgaaaacctaaggaggacagagg

SEQ ID NO: 4351 - DNA, 70 bp, Homo Sapien
tacagatgtcatttgtctcccgccctaagtcctccagtctccttagagctagtacttactaagcatttac

SEQ ID NO: 4352 - DNA, 70 bp, Homo Sapien
cttgacgaaaacagactcctctagtacttggagatcttggacgtacacctaatcccatggggcctcggct

SEQ ID NO: 4353 - DNA, 70 bp, Homo Sapien
tgaggaagggtctattgtctttttaaatggcacaattttaagggtttgagggtacagtcccttaacctgc

SEQ ID NO: 4354 - DNA, 70 bp, Homo Sapien
tgaatttgtgaacaatacaccctctccgcccttggggtaatgtactttgtgatattgccacccgcccccg

SEQ ID NO: 4355 - DNA, 70 bp, Homo Sapien
tgggtctaataaaggatcaaccacatggggttctgcggtgataatgagcacatagtgaggggtcagcaaa

SEQ ID NO: 4356 - DNA, 70 bp, Homo Sapien
acttttagaagacgacaaatcggtaaggcttattcatggttcattgccaggagcagatatgcttttgaga

SEQ ID NO: 4357 - DNA, 70 bp, Homo Sapien
gcctaaaatgggtgatatacaggtcttatatccccatatggaatttatccatcaaccacataaaaacaaa

SEQ ID NO: 4358 - DNA, 70 bp, Homo Sapien
caaaacagcaccagcaattatgtgacctgctttcgatcataagactgtgttaagaccttctcctcagtgt

SEQ ID NO: 4359 - DNA, 70 bp, Homo Sapien
gtgtggtttcccccggaaagatgattttgatcaagcacaggtaatcaggactgtcctcaggactttatgt

SEQ ID NO: 4360 - DNA, 70 bp, Homo Sapien
ttgcagattcacatgaaagcacccagcgatgtgttgcagaaattatagctggtttaatcagaggttctaa

SEQ ID NO: 4361 - DNA, 70 bp, Homo Sapien
gcagtctgatcgatcgcgatgtaagtcgcgagccggcaatcgcgtgtgcacatactcgcagatccttctc

SEQ ID NO: 4362 - DNA, 70 bp, Homo Sapien
gctgcctgcagtgcgctctgaccttctcttcatgtgtgtaaatctgtaatataccattctctgtggcctg

SEQ ID NO: 4363 - DNA, 70 bp, Homo Sapien
ctggtcacgactgcaagaaactgggctgctaaataaatgtgagcgaattcaaggtcgaaaagccagcctg

SEQ ID NO: 4364 - DNA, 70 bp, Homo Sapien
tttctgtaaatttgagactacctttatattctccaacacaagaccgtgtaggtgtcccttcagagagtat

SEQ ID NO: 4365 - DNA, 70 bp, Homo Sapien
atgtcgcctccatttccgaggaacatccttgcgtagagaatgaaatatgctgcaatcatttctgcatcct

SEQ ID NO: 4366 - DNA, 70 bp, Homo Sapien
atgtttcaagtctagtttttacaagcacattacagtaattgcaggttgtccagaggttggtttgtcagag

SEQ ID NO: 4367 - DNA, 70 bp, Homo Sapien
agatggcagcaaggaacccaggtcgagatgggacattgtgcggctcatcccacctcagacgtacctgcaa

SEQ ID NO: 4368 - DNA, 70 bp, Homo Sapien
attcacatgaacgggcacatacaggaaaacacggtaatgtaattagaatagtcagagaaaagtagccaga

SEQ ID NO: 4369 - DNA, 70 bp, Homo Sapien
ctgtccgctcctgtagaaggtagggagcacaatacctagggactaagggatgttcgccggttgtggtttg

SEQ ID NO: 4370 - DNA, 70 bp, Homo Sapien
cagtttcagcgttcaaacagcaatagctcaagtgtgataactactgaggataataaaatccacattcact

SEQ ID NO: 4371 - DNA, 70 bp, Homo Sapien
cctagacatggaaaaacagattactgtctattgtcagcatcattttcatctgtaagtcactactggaata

SEQ ID NO: 4372 - DNA, 70 bp, Homo Sapien
ctaatacatggagttgtgcttcctaagtattgatagcggcgtatatataggattcccacaatttgcagtt

SEQ ID NO: 4373 - DNA, 70 bp, Homo Sapien
tttttcttccctaataggaggtacaatctgcttttgtttgtcgttaagtggtcactcccatttcctttat

SEQ ID NO: 4374 - DNA, 70 bp, Homo Sapien
catttgcaacccagatgtaaaactctaatgatttggccatgaggcgctgctattataagcagctggaaat

SEQ ID NO: 4375 - DNA, 70 bp, Homo Sapien
ggctccacgggcactttctacttgtgcatgggcttggtttatacgaattgccattaaacatcgctgcacc

SEQ ID NO: 4376 - DNA, 70 bp, Homo Sapien
taaggcatgctgaaatttgttgtaaatcccaatctttactgccatggggaaaagaacgctggaattttcc

SEQ ID NO: 4377 - DNA, 70 bp, Homo Sapien
tgtttcctggtggacagccgggtaatgcttttagctgctcgcatgcttgtctttctgcatctccatcatc

SEQ ID NO: 4378 - DNA, 70 bp, Homo Sapien
atgcccatgtcaactttgcaaaagcccagtctccgggcacccctaggcttggaaggaagacgtctcctgg

SEQ ID NO: 4379 - DNA, 70 bp, Homo Sapien
ctgatctgagaagacatgaacgttttctcttcaccgccgtggggtgtattgactggtcccccatgggctg

SEQ ID NO: 4380 - DNA, 70 bp, Homo Sapien
tctggactttttggttccatctgggccccgcaaagcgatgtgtatgaaaattgctgccccatcaacccca

SEQ ID NO: 4381 - DNA, 70 bp, Homo Sapien
ctccggaggtccatctccgagatcgaagaccacaaccggcaactgacccacgagctcagcaagtttaagt

SEQ ID NO: 4382 - DNA, 70 bp, Homo Sapien
agtggtctctagaggtgatcagttcagctgttgacgccttgcagaggctttgtagagcatctgcagagac

SEQ ID NO: 4383 - DNA, 70 bp, Homo Sapien
ccagattgcaaagagttatggatattctggtggggagatgaacccaacctagtgggtgtaatacatcatg

SEQ ID NO: 4384 - DNA, 70 bp, Homo Sapien
aaatatgtttgatgatccagccgactttgacactgttatctccgtaatagctttaccattaggctaggat

SEQ ID NO: 4385 - DNA, 70 bp, Homo Sapien
aacttgtgagggagtttgtattaggtctggtcatggagggatgatgtaccatcaaggtagacccatcttc

SEQ ID NO: 4386 - DNA, 70 bp, Homo Sapien
gatttattccacttgctcgcccggaggtgaaatggacgcatgaacaaggctcagttatgatgtttgagca

SEQ ID NO: 4387 - DNA, 70 bp, Homo Sapien
tgatgaaggggagccaagggaccaccctgcctcagaaaggaccccacttttgggttctagccccactctt

SEQ ID NO: 4388 - DNA, 70 bp, Homo Sapien
ctcagccagaacctcttggtgtacccgataagctgcaggttatcccttgctctgtgcgccttttatttgt

SEQ ID NO: 4389 - DNA, 70 bp, Homo Sapien
caagtctgggaacagccgtaacaggtcaaccttgtggagccatcgcgagttagagggtgaaagatggcag

SEQ ID NO: 4390 - DNA, 70 bp, Homo Sapien
gcggggagaacatgttgcgctggctaactggcagaaccacgcatccctacggttgttgaatctagtctat

SEQ ID NO: 4391 - DNA, 70 bp, Homo Sapien
cgctgccctaagcatattgccaagtatctacaggcagaggcggtaaagaaagaccgactggatttccacc

SEQ ID NO: 4392 - DNA, 70 bp, Homo Sapien
cgtgagatccagttgtagctgccatcagatgccggagactcgcccttcaataaaaaatctcttctagctg

SEQ ID NO: 4393 - DNA, 70 bp, Homo Sapien
atgaactgaacggttaaaagcacagtctatggaacgctaatggagtcagcccctaaagctgtttgctttt

SEQ ID NO: 4394 - DNA, 70 bp, Homo Sapien
gctccccgagagtcctcagtgaaaggattccgcggcactgcctctattattataccgtaaatctttttaa

SEQ ID NO: 4395 - DNA, 70 bp, Homo Sapien
aataaggaggttctttatggaataaacaggtattaagctatttaaaggagagggctgcgaaatgcttgat

SEQ ID NO: 4396 - DNA, 70 bp, Homo Sapien
aaatcgaggacttcgaggctcgcatcgcgctgttgccactgttacaggcagaaaccgaccggaggacctt

SEQ ID NO: 4397 - DNA, 70 bp, Homo Sapien
taacatacctccaacaccgtcatacatatacctccgctacgcaaccttacctagttacgccccaattgta

SEQ ID NO: 4398 - DNA, 70 bp, Homo Sapien
ttcgctctttccggcggtgctcgcaagcgaggcagccatgtcttatcccgctgatgattatgagtctgag

SEQ ID NO: 4399 - DNA, 70 bp, Homo Sapien
ttcttattcatgtgtaagggaggtccatagaatttaggtggtctgtcaactattctacttatgagagaat

SEQ ID NO: 4400 - DNA, 70 bp, Homo Sapien
tggcagtgaaacaccctggttgtaccacaccagtgacagttaagattcccaaggctcggaagaggaagag

SEQ ID NO: 4401 - DNA, 70 bp, Homo Sapien
atgataacccaaaggtagacctgctgttaatgatccagcattggtcacaatgtaccaactgctttctgca

SEQ ID NO: 4402 - DNA, 70 bp, Homo Sapien
caagagtaaagactaaggtttcgagagcattcctactcacataagtgaagaaatctgtcagataggaatc

SEQ ID NO: 4403 - DNA, 70 bp, Homo Sapien
gctggagatagaccttttaaagtctagtaaagaagagctcaataattcattgaaagctactactcagatt

SEQ ID NO: 4404 - DNA, 70 bp, Homo Sapien
aagttacttaaacctgagctttaggacctttaaaatctcagcatgccttttaagctagtacttttcctgt

SEQ ID NO: 4405 - DNA, 70 bp, Homo Sapien
aggcccaataatatttggaccaagtgggaaacaagaacactcggaggggcgggaatcagaagagcctgga

SEQ ID NO: 4406 - DNA, 70 bp, Homo Sapien
ctttctgtatttgcgtctttcttgtgactaaccaccctgatatagtattaaccactgtgttcaagagtaa

SEQ ID NO: 4407 - DNA, 70 bp, Homo Sapien
tgtgtcttggggcggaatggtgtctcagatgttgtgaaaattaacttgaattctgaggaggaggcccttt

SEQ ID NO: 4408 - DNA, 70 bp, Homo Sapien
tgtcaaacatgagatgtgtggactgtggcacttgcctgggtcacacacggaggcatcctacccttttctg

SEQ ID NO: 4409 - DNA, 70 bp, Homo Sapien
catgagccgaggggccttgctcagctccatccagaatttccaaaaaggaactttgaggaaagccaaaacc

SEQ ID NO: 4410 - DNA, 70 bp, Homo Sapien
ttcaatgacaggcttggactagctgtggcccagacatcggccctgcccagaattgccaggaggaggcttt

SEQ ID NO: 4411 - DNA, 70 bp, Homo Sapien
tgacagcttgacacatgcctcctaagagaggagtgcattgctttagtacccgggccagttgagactgaaa

SEQ ID NO: 4412 - DNA, 70 bp, Homo Sapien
agagcctctgatgtacgaagtaggtccaaagttgttgaccgtatttacagtctctacaaacttacagctc

SEQ ID NO: 4413 - DNA, 70 bp, Homo Sapien
gagctgtcagcgacgtgaggtgtcccttctcgttgagatatttaactttggttttgctctagttctttct

SEQ ID NO: 4414 - DNA, 70 bp, Homo Sapien
gcaagctaccgactagaaatactataatcagttggacatctagcagggtggatcatgttatggactccgt

SEQ ID NO: 4415 - DNA, 70 bp, Homo Sapien
agcccttgaacggagaatagagtacattgaagctcgggtgacaaaaggtgagacactcacctagaacagt

SEQ ID NO: 4416 - DNA, 70 bp, Homo Sapien
ctcctgggcaaggggctgttgtgagcccattggtatagcaactagtggtgctgtctactgcaaagcaaat

SEQ ID NO: 4417 - DNA, 70 bp, Homo Sapien
gaggactggggtaagcggaataaactagagaagggagacattgtttggatttcctttatactgtgaagtt

SEQ ID NO: 4418 - DNA, 70 bp, Homo Sapien
ttgtccctcaggaagacaccatacaatcttggattcatgcagaacctggcagatttctttcagtgtggct

SEQ ID NO: 4419 - DNA, 70 bp, Homo Sapien
tgcagttcatgagggagggggcgggggactgaaggggaaagggcgttaaagtgatacatttttataccaa

SEQ ID NO: 4420 - DNA, 70 bp, Homo Sapien
atggagatcatagttccgtgagcgagcaattcagggactcggcgagcatgcactccggcaggtacggcta

SEQ ID NO: 4421 - DNA, 70 bp, Homo Sapien
acaaagcgctccaactatacttcgatcaccaatgtacctccagacgtaactgtgctcacaaacagccctg

SEQ ID NO: 4422 - DNA, 70 bp, Homo Sapien
tgcctatgcaagtgtctaacttctgtgcctgttaatcatgggagggtgagacagaacaatccctaaaggg

SEQ ID NO: 4423 - DNA, 70 bp, Homo Sapien
catcaggggaaacacgaaacatacggccataaaactccttattagagagtctacagataaatctacagag

SEQ ID NO: 4424 - DNA, 70 bp, Homo Sapien
acaacgacccccgcgttttccccgtactagatggttagggcgcatagtgccgaactacgctgctgctaca

SEQ ID NO: 4425 - DNA, 70 bp, Homo Sapien
ctgcaaatctagtgccgaaatctagtgccgaatgactatgtccagattggtgacgatgggtgttgctgtt

SEQ ID NO: 4426 - DNA, 70 bp, Homo Sapien
gcttagggaaatttcacagttcattgtggagtgttaaacttagaacatgtgtaacttttcacataaagag

SEQ ID NO: 4427 - DNA, 70 bp, Homo Sapien
ggctgtccttcaggaccagccagtttacaagcatgtctcaagctagtgtgttccattatgctcacagcag

SEQ ID NO: 4428 - DNA, 70 bp, Homo Sapien
acaaaaggagattcgaacattctagaggggacatccacaagtctcggtgcagttatgatggtgtgggatg

SEQ ID NO: 4429 - DNA, 70 bp, Homo Sapien
gtgaagcggttggatccattactcaacccttacctagcagttatttgatcatccgagctacttcagagtc

SEQ ID NO: 4430 - DNA, 70 bp, Homo Sapien
tgtttagtaacaagattaccttcttaatggacctcctgatacaccagttgacggtttatgttccagatga

SEQ ID NO: 4431 - DNA, 70 bp, Homo Sapien
agcaggtctgcagtgatcagatgggtttctcacatattgttaagttgaaagtagccgtggctcagtatga

SEQ ID NO: 4432 - DNA, 70 bp, Homo Sapien
aggggccatgggggctgtgaatgggatgcagccccatggtgtccctgataaatccagtgtgcagtctgat

SEQ ID NO: 4433 - DNA, 70 bp, Homo Sapien
cacagctgcccgccgtggaaattgaggaagggcggctggagatgatagagacaaaagtcaagccctcttc

SEQ ID NO: 4434 - DNA, 70 bp, Homo Sapien
cccctgaatgaacaaagtgtggacatgccaatacacattactgacaggtatgcccacctgacctgcaccc

SEQ ID NO: 4435 - DNA, 70 bp, Homo Sapien
gaaaggcgagcaaccagaacagagcacaacaaaggacgagcagcgccagccgagacgacgtaaggacaca

SEQ ID NO: 4436 - DNA, 70 bp, Homo Sapien
ttaatgcgaacagacagacttgaggtatgtcgagagtaccaacgtggcaattgcaaccgaggagaaaatg

SEQ ID NO: 4437 - DNA, 70 bp, Homo Sapien
gcatctctctcctttttgaccagtgtcatcatcttttccaaaagcagagtataaagaaatcttgtggctc

SEQ ID NO: 4438 - DNA, 70 bp, Homo Sapien
ctgggggtgaaatcttacagcgcgggttccgttacctttcccggatacttttccgggaatgatgtacaca

SEQ ID NO: 4439 - DNA, 70 bp, Homo Sapien
tacagataattacctactctggctagaagctaggggtcccagtgaagagccactgccattaaagaatatg

SEQ ID NO: 4440 - DNA, 70 bp, Homo Sapien
tacgctcacccacctcactatactctcccttatcgcgcgtctatatggccccgatcacccttccgccttg

SEQ ID NO: 4441 - DNA, 70 bp, Homo Sapien
ccgcccgagactccgaacttgtcgcattgcgtttcttgtatcgggaaatacttattgttggaacctctgg

SEQ ID NO: 4442 - DNA, 70 bp, Homo Sapien
gcagtgtattacttatgtgtttgtggagatgttggtgtaaacctactgcactgctaattctataaaagta

SEQ ID NO: 4443 - DNA, 70 bp, Homo Sapien
taacttacatggaaagcatgagactatatgctagagaccatgaagattatgacccacaaactgtgaggct

SEQ ID NO: 4444 - DNA, 70 bp, Homo Sapien
ttgtaaactgttccctgatgtccttgtttaaacgataataagaaaaagggcaactccatttgttgagggt

SEQ ID NO: 4445 - DNA, 70 bp, Homo Sapien
tctggttaaacagctgtacttttgatagctgtgccaggaagggttaggaccaactacaaattaatgttgg

SEQ ID NO: 4446 - DNA, 70 bp, Homo Sapien
ggttgtcgaaattttgcacaagaacaatgcccctgtgcagatattacaggagtatgtcaatctggtggaa

SEQ ID NO: 4447 - DNA, 70 bp, Homo Sapien
atcgggtccctaggaatcgtgatcggcggactcacgtccatggctccttccagaaagcgtgatatcgcct

SEQ ID NO: 4448 - DNA, 70 bp, Homo Sapien
catttctgctgcaaacctggtcagagccagtgttccctccatgggacctaaagacagtgccaagtgcctg

SEQ ID NO: 4449 - DNA, 70 bp, Homo Sapien
aattggagtttactgtcatctgtttccgtttctctaagatagggatcctggcgaagcccatgaaagccat

SEQ ID NO: 4450 - DNA, 70 bp, Homo Sapien
tatgatgaaaccctggaagataggtagcaactagactgtcgtttttggtggagcggttcatttatttgga

SEQ ID NO: 4451 - DNA, 70 bp, Homo Sapien
ccagagttaaatgcagatgtccacacgaggggtcggagttacctgatcacatcgagagagtgctgggcag

SEQ ID NO: 4452 - DNA, 70 bp, Homo Sapien
aaatcagtgcaatgaagactttggatttattaaaaccaagttgtccctaaggaatcagatgtgggcatct

SEQ ID NO: 4453 - DNA, 70 bp, Homo Sapien
tagcaatgaaagcaatatgatatgctgcagtgtgaagctccttctggggttatcgtatgtacaaagttta

SEQ ID NO: 4454 - DNA, 70 bp, Homo Sapien
atgcagattcctggtatcacttgctcgctactttctagggtcttaatagtagtcaagaaaagggatctga

SEQ ID NO: 4455 - DNA, 70 bp, Homo Sapien
ggaattgcagttagagagagtaaggaataccatttagtcatctatccgttcttcacttagcaggaatatg

SEQ ID NO: 4456 - DNA, 70 bp, Homo Sapien
caatgatcagctcccgcgactgctacgtgctcattagtgttcgtccgacgacgaccgtcatatgtccacc

SEQ ID NO: 4457 - DNA, 70 bp, Homo Sapien
ataccagggatggcccctggcttggcctgcgaaggtgaacctgcccagatttatcagtagaggctggact

SEQ ID NO: 4458 - DNA, 70 bp, Homo Sapien
ctgtttgtatgagaaacccagtaaccaataaaatgaccgcatattcctgactaaacgtagtaaggaaaat

SEQ ID NO: 4459 - DNA, 70 bp, Homo Sapien
ctacaagacactgcccccacgctctctgctcagtcctctcccacacgatctatccctaaacctttcgcgg

SEQ ID NO: 4460 - DNA, 70 bp, Homo Sapien
tgcacgtctgtgatttgagaggtgagttatttaagaggccagttttcaggacatgggaatttgaattgta

SEQ ID NO: 4461 - DNA, 70 bp, Homo Sapien
tccagaatggctctggtattaatgaatctagtgccttttaaatgtatcccacgttttgttccctaccatc

SEQ ID NO: 4462 - DNA, 70 bp, Homo Sapien
gcctttctcagtgtccgtggcatttttgtgacttcccagcactagaataagttttcctgccaaaatgagt

SEQ ID NO: 4463 - DNA, 70 bp, Homo Sapien
acagttgagtcatggaatgtaggtgtctgcttcacatcttttagtaggtatagcttgtcaaagatggtga

SEQ ID NO: 4464 - DNA, 70 bp, Homo Sapien
cagatgggtgatttaagtgagtcacaagtcacaaaactttgctattcatagttaatcaaatagaactggg

SEQ ID NO: 4465 - DNA, 70 bp, Homo Sapien
tttcagtaaaaatgcctgttgtgagatgaacctcctgtaacttctatctgttcttttttgaggctcaggg

SEQ ID NO: 4466 - DNA, 70 bp, Homo Sapien
cattcgatatgctaaccgttctcagccctgagccttggagaggagggctgtaacgccttcagtcagtctc

SEQ ID NO: 4467 - DNA, 70 bp, Homo Sapien
cccacgatgccagcctggttcacaaatctccagaccccttcggagcagtagcagctcagaagttcagcct

SEQ ID NO: 4468 - DNA, 70 bp, Homo Sapien
gacagtttcttagctttttaattgttgtttctttctagtggtctttgtaagagtgtagaagcattccttc

SEQ ID NO: 4469 - DNA, 70 bp, Homo Sapien
gagactgctgatattctatgtccaaaagcaaaacggacaagtcggtttttaagtggcattatcaacttta

SEQ ID NO: 4470 - DNA, 70 bp, Homo Sapien
ccttttggtttacctggggatccaattgatgtatatgtttatatactgggttcttgttttatatacctgg

SEQ ID NO: 4471 - DNA, 70 bp, Homo Sapien
atgaatggagacaagttccgtcgccttgtgaaagccccaccgagaaattactccgttatcgtcatgttca

SEQ ID NO: 4472 - DNA, 70 bp, Homo Sapien
acagaaactgatgttccatgcatgttcctgcttccaaagcctgaccttccaaagcttgcttccttcctcc

SEQ ID NO: 4473 - DNA, 70 bp, Homo Sapien
ggatgcctagttgaggatgttcccaaagttttgtccaatcttatcattagtagattttataagccacaga

SEQ ID NO: 4474 - DNA, 70 bp, Homo Sapien
ccccacactcgcgagaacgaccaaaaatgaaacgaatacggccggaaaccgatcccatgtgccgggccaa

SEQ ID NO: 4475 - DNA, 70 bp, Homo Sapien
ccaaacaaacaggcagagttcactattctatctgccattagaccttcttatcatccatactaaagcccca

SEQ ID NO: 4476 - DNA, 70 bp, Homo Sapien
ggataagatccttgaatatggaacttagttacaggactcaataatggtgggtgaacattagtcattttta

SEQ ID NO: 4477 - DNA, 70 bp, Homo Sapien
gctcttctgttcctgcgacacctctgttctatgatcttcgctcttgttgtttctcaccatgtgtcagctg

SEQ ID NO: 4478 - DNA, 70 bp, Homo Sapien
acgacaggagtctagttccactgtggaattcctttctggttgtacatttgctaggtagtgacaactaatg

SEQ ID NO: 4479 - DNA, 70 bp, Homo Sapien
cctcactctttatagtgcacaaaatgaatgaggtctgggctaggtagaaaaagggtcaatgctatttttg

SEQ ID NO: 4480 - DNA, 70 bp, Homo Sapien
atttccaatcagtttgattgggctctaatgagactagatctttctgttcgaagaactggccgcattccaa

SEQ ID NO: 4481 - DNA, 70 bp, Homo Sapien
cagtactacctgggttgagttagcaaccaccgttatacgtactacctataaagccacccgccttactact

SEQ ID NO: 4482 - DNA, 70 bp, Homo Sapien
tccagtaaaaaactcctgcactgaagtcattgtgacttgagtagttacagactgattccagtgaacttga

SEQ ID NO: 4483 - DNA, 70 bp, Homo Sapien
cctggataaaggcactttcactgcctgtcactgatcagcagatactgacttgttgccattaagtgaactt

SEQ ID NO: 4484 - DNA, 70 bp, Homo Sapien
actaatcacctcttctgtcattccgtccttggccaccgctcagtgggaatggtctctgatctggatgctc

SEQ ID NO: 4485 - DNA, 70 bp, Homo Sapien
ttacaagcagtctgggataactaactcctagggataaccatttctatcctgttccaaagtcttattttat

SEQ ID NO: 4486 - DNA, 70 bp, Homo Sapien
gtggcaatgaccttgaactgagagcctgtatctggatttagcacttgaaagatctaactggatatttggg

SEQ ID NO: 4487 - DNA, 70 bp, Homo Sapien
ttgaatattgtttttgcaccagacgaacagtgaggaaattcggagctatacatatgtgcagaaggttact

SEQ ID NO: 4488 - DNA, 70 bp, Homo Sapien
ggttgatgtatttagcttgaatccttcactttagtggtctaatcaacagataaatgacaagcaaagaatg

SEQ ID NO: 4489 - DNA, 70 bp, Homo Sapien
agaaagtatcttcctccaggcttgtaatacccttcacatggaagattaatgagggaaatctttatattct

SEQ ID NO: 4490 - DNA, 70 bp, Homo Sapien
acccagcacgaatctgcaaagatttacttaactgtgaacaaaaagtatcagatggaaaatactggattga

SEQ ID NO: 4491 - DNA, 70 bp, Homo Sapien
agtctcccagcctccactttcagagtgaaattcaaggcagcacggacatgtgcccatcaggcacagaaga

SEQ ID NO: 4492 - DNA, 70 bp, Homo Sapien
ggtggcattccgacagcaggacatacatgttggtgtgaagactgggacgacactgggtagaatctagttt

SEQ ID NO: 4493 - DNA, 70 bp, Homo Sapien
actgagatagaaggaccagccactttgaacgccttagaggcaaaaagagctttgtgagttgtaagaggaa

SEQ ID NO: 4494 - DNA, 70 bp, Homo Sapien
agagagccccggatttctcctggactccatgtgcagatgcctagtatttccattctgaccgttgccctcc

SEQ ID NO: 4495 - DNA, 70 bp, Homo Sapien
ctgagaaagtggagccactcactccagaaaaggtggatagaggtgttcatccccagattttccatttctg

SEQ ID NO: 4496 - DNA, 70 bp, Homo Sapien
ttgttttcggcaggggccttgtctctcactgcatttggtcaggggggcatgaataaaggctacaggctcc

SEQ ID NO: 4497 - DNA, 70 bp, Homo Sapien
ctgtacatcagaaatgtcactattccaagtgtctttttagtgtggctttagtatggcttccttttaatat

SEQ ID NO: 4498 - DNA, 70 bp, Homo Sapien
accagggaaagtgaacatgagttccgaattcctgcgtttcaagtggggaatcgggcgcctgattgctgag

SEQ ID NO: 4499 - DNA, 70 bp, Homo Sapien
atgtctggatgatcggcagggcaggaatctgagcgctggccccgtggtgaggccatgttctcataatcag

SEQ ID NO: 4500 - DNA, 70 bp, Homo Sapien
cctaggcaaagagtatatgtaggaggtgggatatcacttccatgacataagtgctattgcagagccgtgg

SEQ ID NO: 4501 - DNA, 70 bp, Homo Sapien
tggtatgtttgtatttggggtgtccctccggctctaggcggcctctgacctgctgtctactccccacctt

SEQ ID NO: 4502 - DNA, 70 bp, Homo Sapien
tggcttctgctgtcgtgtccatccttccttcgtctggctcgtgattcacttattcgccctccctactttg

SEQ ID NO: 4503 - DNA, 70 bp, Homo Sapien
tgtggtttcccccattgtagcagggagctagcgtattagccttgtgggcaacatgatgcatgggaaatga

SEQ ID NO: 4504 - DNA, 70 bp, Homo Sapien
gctggtctaagcaagctgagatcatttgcaatggaaaacacgtaacttgtttaaaagtttttctggtagc

SEQ ID NO: 4505 - DNA, 70 bp, Homo Sapien
aaaagggtcccctagttgaggatagtcaggagcgtcaatgtgcttgtacatagagtgctgtagctgtgtg

SEQ ID NO: 4506 - DNA, 70 bp, Homo Sapien
agacaccaggacaatgacagcatcgggtgttgttgtcatcacagcgcctcagttagaggatgttcctctt

SEQ ID NO: 4507 - DNA, 70 bp, Homo Sapien
ccttgtccgggcgcaacatgcaattatattaaactcggccaaaccctctgcgggataaaggggttttgtt

SEQ ID NO: 4508 - DNA, 70 bp, Homo Sapien
ggatgattctgtgactcatagaacatgatgttaaatgagaccagactcaactgccaccagtccccagctg

SEQ ID NO: 4509 - DNA, 70 bp, Homo Sapien
gaccccgaagatggtgcagcttggatagtgaatgtgcaagttagctatgcagagtgtacttccttttctg

SEQ ID NO: 4510 - DNA, 70 bp, Homo Sapien
ctcactttgaaagtggtgtccgcaaagcccaaggtgcataatcgtcaacctcgaattaactcctacgtgg

SEQ ID NO: 4511 - DNA, 70 bp, Homo Sapien
tagtaggtagggggtactactagggatatctgtggcatgattatgcattccgtagtattatttaattaat

SEQ ID NO: 4512 - DNA, 70 bp, Homo Sapien
agcggcatgtacaaagagaccgtctactccgccttcaatctgctcatgcattacccacccccctcgggag

SEQ ID NO: 4513 - DNA, 70 bp, Homo Sapien
aaagttgccgagggtaggttcatctccaggtttcgggattcccatccgtcctggcgatcctgccagcagt

SEQ ID NO: 4514 - DNA, 70 bp, Homo Sapien
ttgttaccgtgggcaactctgtcaacgaaggcttgaaccaacctacggatgactcgtgctttgaccccta

SEQ ID NO: 4515 - DNA, 70 bp, Homo Sapien
tcctttcacccaagaaccacaacgagacaaacctgccaacgtccagccttattacctctatggatccaag

SEQ ID NO: 4516 - DNA, 70 bp, Homo Sapien
cgtaaacagtgttacacggctttcctccacctgcgaaggtattctaatctgattttgaacttgttttcct

SEQ ID NO: 4517 - DNA, 70 bp, Homo Sapien
ctcctccagcctcattgaaactctttttgtggatttgatgaccttatggatattgccaaagtttaaggca

SEQ ID NO: 4518 - DNA, 70 bp, Homo Sapien
gcagactgctaaactgttctctgtataagttatggtatgcatgagctgtgtaaattttgtgaatatgtat

SEQ ID NO: 4519 - DNA, 70 bp, Homo Sapien
aagtcttactctgtatgtaacaatccatcattcaccttcactactggtagtaacatagagctgccatttt

SEQ ID NO: 4520 - DNA, 70 bp, Homo Sapien
tgcacagttctcgaagcccgcccgtgttacaacgtggctcgcctaatgttcctcgatgcagagaggaaga

SEQ ID NO: 4521 - DNA, 70 bp, Homo Sapien
gtgagaaagggcatacatccacagattcactttgtttatgcatatgtagatacaaggatgcacatataca

SEQ ID NO: 4522 - DNA, 70 bp, Homo Sapien
tttccctgtttaatgattgacgtacttagcagctatctctcagtgaactgtgagggtaaaggctatactt

SEQ ID NO: 4523 - DNA, 70 bp, Homo Sapien
aatacatactaacattcttgtaggagtggttagagaagctgatgcctcatttctacattctgtcattagc

SEQ ID NO: 4524 - DNA, 70 bp, Homo Sapien
acattcatctggtttagacttaatatgccacaacgcaccacgaccttcccagggtgacaccgcctcagcc

SEQ ID NO: 4525 - DNA, 70 bp, Homo Sapien
cagtacatccccgcactgggcgtaggtgattttcatctctccagtcggggtccggtcaaacaatgaaaag

SEQ ID NO: 4526 - DNA, 70 bp, Homo Sapien
acttagggatggctcattgaacgatggtggtaatatggcgctaaaacatacaccactgaaaacactacca

SEQ ID NO: 4527 - DNA, 70 bp, Homo Sapien
gtgatgttataaatgaggggagtaaaggaacatgagataaccactaatatgacataccaatagactatga

SEQ ID NO: 4528 - DNA, 70 bp, Homo Sapien
agcaacaggcggcgagtcaaaacccaaggtgtgtttatctaaactgggcaattcctcttctaggaattta

SEQ ID NO: 4529 - DNA, 70 bp, Homo Sapien
taaagcgaggaagcagatgccaggcagtgaagacttgcacaccgtcacactgttaactggtagagaggca

SEQ ID NO: 4530 - DNA, 70 bp, Homo Sapien
cgataaatccctttaatctcctctacatatactgagtattaaaaaacagaatcggctagaacattgttgc

1. A system for profiling a hematological cancer comprising at least ten polynucleotide probes, each of said probes being between about 15 and about 500 nucleotides in length and comprising a sequence corresponding to, or complementary to, an mRNA transcribed from a gene selected from the group of genes set forth in Table 1, wherein the level of expression of said gene is indicative of one or more features of said hematological cancer.

2. The system according to claim 1, wherein said one or more features are selected from the group of: presence, absence, type, subtype, stage, progression, grade, aggressivity, outcome, survival and drug-responsiveness.

3. The system according to claim 1, wherein each of said probes comprises a sequence corresponding to, or complementary to, an mRNA transcribed from a gene selected from the group of genes set forth in Tables 2-19.

4. The system according to claim 1, wherein said at least ten polynucleotide probes are selected from:
(a) at least ten polynucleotide probes comprising a sequence corresponding to, or complementary to, an mRNA transcribed from a gene from a set of genes comprising one or more genes as set forth in Table 2;
(b) at least ten polynucleotide probes comprising a sequence corresponding to, or complementary to, an mRNA transcribed from a gene from a set of genes comprising one or more genes as set forth in Table 3;
(c) at least ten polynucleotide probes comprising a sequence corresponding to, or complementary to, an mRNA transcribed from a gene from a set of genes comprising one or more genes as set forth in Table 4;
(d) at least ten polynucleotide probes comprising a sequence corresponding to, or complementary to, an mRNA transcribed from a gene from a set of genes comprising one or more genes as set forth in Table 5;
(e) at least ten polynucleotide probes comprising a sequence corresponding to, or complementary to, an mRNA transcribed from a gene from a set of genes comprising one or more genes as set forth in Table 6;
(f) at least ten polynucleotide probes comprising a sequence corresponding to, or complementary to, an mRNA transcribed from a gene from a set of genes comprising one or more genes as set forth in Table 7;
(g) at least ten polynucleotide probes comprising a sequence corresponding to, or complementary to, an mRNA transcribed from a gene from a set of genes comprising one or more genes as set forth in Table 8;
(h) at least ten polynucleotide probes comprising a sequence corresponding to, or complementary to, an mRNA transcribed from a gene from a set of genes comprising one or more genes as set forth in Table 9;
(i) at least ten polynucleotide probes comprising a sequence corresponding to, or complementary to, an mRNA transcribed from a gene from a set of genes comprising one or more genes as set forth in Table 10;
(j) at least ten polynucleotide probes comprising a sequence corresponding to, or complementary to, an mRNA transcribed from a gene from a set of genes comprising one or more genes as set forth in Table 11;
(k) at least ten polynucleotide probes comprising a sequence corresponding to, or complementary to, an mRNA transcribed from a gene from a set of genes comprising one or more genes as set forth in Table 12;
(l) at least ten polynucleotide probes comprising a sequence corresponding to, or complementary to, an mRNA transcribed from a gene from a set of genes comprising one or more genes as set forth in Table 13;
(m) at least ten polynucleotide probes comprising a sequence corresponding to, or complementary to, an mRNA transcribed from a gene from a set of genes comprising one or more genes as set forth in Table 14;
(n) at least ten polynucleotide probes comprising a sequence corresponding to, or complementary to, an mRNA transcribed from a gene from a set of genes comprising one or more genes as set forth in Table 15;
(o) at least ten polynucleotide probes comprising a sequence corresponding to, or complementary to, an mRNA transcribed from a gene from a set of genes comprising one or more genes as set forth in Table 16;
(p) at least ten polynucleotide probes comprising a sequence corresponding to, or complementary to, an mRNA transcribed from a gene from a set of genes comprising one or more genes as set forth in Table 17;
(q) at least ten polynucleotide probes comprising a sequence corresponding to, or complementary to, an mRNA transcribed from a gene from a set of genes comprising one or more genes as set forth in Table 18, and
(r) at least ten polynucleotide probes comprising a sequence corresponding to, or complementary to, an mRNA transcribed from a gene from a set of genes comprising one or more genes as set forth in Table 19.

5. The system according to claim 1, wherein each of said probes comprises at least 15 nucleotides of a sequence as set forth in any one of SEQ ID NOs: 1-4530.

6. The system according to claim 1, wherein each of said probes comprises a sequence as set forth in any one of SEQ ID NOs: 1-4530.

7. The system according to claim 1, wherein said system comprises at least 50 polynucleotide probes.

8. The system according to claim 1, wherein said system comprises at least 100 polynucleotide probes.

9. The system according to claim 1, wherein said hematological cancer is selected from the group of lymphoma and leukemia.

10. The system according to claim 1, wherein said hematological cancer is a lymphoma selected from the group of: B-cell chronic lymphocytic leukemia/small lymphocytic lymphoma (CLL/SLL), B-cell prolymphocytic leukemia, lymphoplamacytic lymphoma, splenic marginal zone B-cell lymphoma, nodal marginal zone B-cell lymphoma, hairy cell leukemia, plasma cell myeloma/plasmacytoma, follicular lymphoma (FL), mantle cell lymphoma (MCL), Burkitt's lymphoma, diffuse large cell B-cell lymphoma (DLBCL) Hodgkin's lymphoma, lymphoblastic lymphoma, anaplastic large cell lymphoma (ALCL), cutaneous T-cell lymphoma, mycosis fungoids/Sézary's syndrome, peripheral T-cell lymphomas, angioimmunoblastic lymphoma, angiocentric lymphoma (nasal T-cell lymphoma), intestinal T-cell lymphoma, and adult T-cell lymphoma/leukemia.

11. The system according to claim 1, wherein said hematological cancer is a leukemia selected from the group of: acute myelogenous leukemia, acute lymphocytic leukemia, chronic myelogenous leukemia, and chronic lymphocytic leukemia.

12. Use of the system according to claim 1, for the preparation of a nucleic acid array.

13. A method of profiling a hematological cancer in a subject comprising:
(a) providing one or more gene sets, each gene set comprising at least five genes selected from the genes set forth in Table 1, wherein the expression level of each gene in said one or more gene sets is indicative of a feature of a hematological cancer;
(b) determining the expression level of each gene in said one or more gene sets in a test sample obtained from said subject to provide an expression pattern profile, and
(c) comparing said expression pattern profile with a reference expression pattern profile.

14. The method according to claim 13, wherein said feature is selected from the group of: presence, absence, type, subtype, stage, progression, grade, aggressivity, outcome, survival and drug-responsiveness.

15. The method according to claim 13, wherein the expression level of each gene is determined in step (b) by contacting the test sample with a plurality of polynucleotide probes, each of said probes being between about 15 and about 500 nucleotides in length and comprising a sequence corresponding to, or complementary to, a gene from said one or more gene sets.

16. The method according to claim 15, wherein each of said probes comprises at least 15 nucleotides of a sequence as set forth in any one of SEQ ID NOs: 1-4530.

17. The method according to claim 13, wherein said hematological cancer is selected from the group of lymphoma and leukemia.

18. The method according to claim 13, wherein said hematological cancer is a lymphoma selected from the group of: B-cell chronic lymphocytic leukemia/small lymphocytic lymphoma (CLL/SLL), B-cell prolymphocytic leukemia, lymphoplamacytic lymphoma, splenic marginal zone B-cell lymphoma, nodal marginal zone B-cell lymphoma, hairy cell leukemia, plasma cell myeloma/plasmacytoma, follicular lymphoma (FL), mantle cell lymphoma (MCL), Burkitt's lymphoma, diffuse large cell B-cell lymphoma (DLBCL) Hodgkin's lymphoma, lymphoblastic lymphoma, anaplastic large cell lymphoma (ALCL), cutaneous T-cell lymphoma, mycosis fungoids/Sézary's syndrome, peripheral T-cell lymphomas, angioimmunoblastic lymphoma, angiocentric lymphoma (nasal T-cell lymphoma), intestinal T-cell lymphoma, and adult T-cell lymphoma/leukemia.

19. The method according to claim 13, wherein said hematological cancer is a leukemia selected from the group of: acute myelogenous leukemia, acute lymphocytic leukemia, chronic myelogenous leukemia, and chronic lymphocytic leukemia.

20. The method according to claim 13, wherein each of said gene sets comprises at least ten genes and said one or more gene sets are selected from the group of:
(a) a gene set comprising at least ten genes selected from the genes set forth in Table 32;
(b) a gene set comprising at least ten genes selected from the genes set forth in Table 33;
(c) a gene set comprising at least ten genes selected from the genes set forth in Table 34;
(d) a gene set comprising at least ten genes selected from the genes set forth in Table 35;
(e) a gene set comprising at least ten genes selected from the genes set forth in Table 36;
(f) a gene set comprising at least ten genes selected from the genes set forth in Table 37;
(g) a gene set comprising at least ten genes selected from the genes set forth in Table 38;
(h) a gene set comprising at least ten genes selected from the genes set forth in Table 39;
(i) a gene set comprising at least ten genes selected from the genes set forth in Table 40, and
(j) a gene set comprising at least ten genes selected from the genes set forth in Table 41.

21. A nucleic acid array comprising at least ten polynucleotide probes immobilized on a solid support, each of said probes being between about 15 and about 500 nucleotides in length and comprising a sequence corresponding to, or complementary to, an mRNA transcribed from a gene selected from the group of genes set forth in Table 1, wherein the level of expression of said gene is indicative of one or more features of said hematological cancer.

22. The nucleic acid array according to claim 21, wherein said one or more features are selected from the group of: presence, absence, type, subtype, stage, progression, grade, aggressivity, outcome, survival and drug-responsiveness.

23. The nucleic acid array according to claim 21, wherein each of said probes comprises at least 15 nucleotides of a sequence as set forth in any one of SEQ ID NOs: 1-4530.

24. The nucleic acid array according to claim 21, wherein each of said probes comprises a sequence as set forth in any one of SEQ ID NOs: 1-4530.

25. The nucleic acid array according to claim 21, wherein each of said probes comprises a sequence as set forth in any one of SEQ ID NOs: 1-1153.

26. The nucleic acid array according to claim 21, wherein each of said probes comprises a sequence as set forth in any one of SEQ ID NOs: 1154-2299.

27. The nucleic acid array according to claim 21, wherein each of said probes comprises a sequence as set forth in any one of SEQ ID NOs: 2300-3426.

28. The nucleic acid array according to claim 21, wherein each of said probes comprises a sequence as set forth in any one of SEQ ID NOs: 3427-4530.

29. The nucleic acid array according to claim 21, wherein said nucleic acid array comprises at least 50 polynucleotide probes.

30. The nucleic acid array according to claim 21, wherein said nucleic acid array comprises at least 100 polynucleotide probes.

31. The nucleic acid array according to claim 21, wherein each of said probes comprises a sequence corresponding to, or complementary to, an mRNA transcribed from a gene selected from the group of genes set forth in Table 2.

32. The nucleic acid array according to claim 21, wherein each of said probes comprises a sequence corresponding to, or complementary to, an mRNA transcribed from a gene selected from the group of genes set forth in Table 3.

33. The nucleic acid array according to claim 21, wherein said at least ten polynucleotide probes are selected from:
(a) at least ten polynucleotide probes comprising a sequence corresponding to, or complementary to, an mRNA transcribed from a gene from a set of genes comprising one or more genes as set forth in Table 32;
(b) at least ten polynucleotide probes comprising a sequence corresponding to, or complementary to, an mRNA transcribed from a gene from a set of genes comprising one or more genes as set forth in Table 33;
(c) at least ten polynucleotide probes comprising a sequence corresponding to, or complementary to, an mRNA transcribed from a gene from a set of genes comprising one or more genes as set forth in Table 34;
(d) at least ten polynucleotide probes comprising a sequence corresponding to, or complementary to, an mRNA transcribed from a gene from a set of genes comprising one or more genes as set forth in Table 35;
(e) at least ten polynucleotide probes comprising a sequence corresponding to, or complementary to, an mRNA transcribed from a gene from a set of genes comprising one or more genes as set forth in Table 36;
(f) at least ten polynucleotide probes comprising a sequence corresponding to, or complementary to, an mRNA transcribed from a gene from a set of genes comprising one or more genes as set forth in Table 37;
(g) at least ten polynucleotide probes comprising a sequence corresponding to, or complementary to, an mRNA transcribed from a gene from a set of genes comprising one or more genes as set forth in Table 38;
(h) at least ten polynucleotide probes comprising a sequence corresponding to, or complementary to, an mRNA transcribed from a gene from a set of genes comprising one or more genes as set forth in Table 39;
(i) at least ten polynucleotide probes comprising a sequence corresponding to, or complementary to, an mRNA transcribed from a gene from a set of genes comprising one or more genes as set forth in Table 40, and
(j) at least ten polynucleotide probes comprising a sequence corresponding to, or complementary to, an mRNA transcribed from a gene from a set of genes comprising one or more genes as set forth in Table 41.

34. The nucleic acid array according to claim 21, further comprising one or more control probes.

35. A polynucleotide probe between about 15 and about 500 nucleotides in length and comprising a sequence corresponding to, or complementary to, an mRNA transcribed from a gene selected from the group of genes set forth in Table 1, wherein said probe comprises at least 15 consecutive nucleotides of a sequence as set forth in any one of SEQ ID NOs: 1-4530.

36. The polynucleotide probe according to claim 35, wherein said polynucleotide probe comprises a sequence as set forth in as set forth in SEQ ID NOs: 1-4530.

37. The polynucleotide probe according to claim 35, wherein said polynucleotide probe consists of a sequence as set forth in any one of SEQ ID NOs: 1-4530.

38. A set of genes having an expression pattern representative of one or more features of a hematological cancer and comprising at least ten genes selected from:
(a) at least ten genes selected from the genes set forth in Table 32;
(b) at least ten genes selected from the genes set forth in Table 33;
(c) at least ten genes selected from the genes set forth in Table 34;
(d) at least ten genes selected from the genes set forth in Table 35;
(e) at least ten genes selected from the genes set forth in Table 36;
(f) at least ten genes selected from the genes set forth in Table 37;
(g) at least ten genes selected from the genes set forth in Table 38;
(h) at least ten genes selected from the genes set forth in Table 39;
(i) at least ten genes selected from the genes set forth in Table 40, and
(j) at least ten genes selected from the genes set forth in Table 41.

39. The set of genes according to claim 38, wherein said one or more features are selected from the group of: presence, absence, type, subtype, stage, progression, grade, aggressivity, outcome, survival and drug-responsiveness.

40. The set of genes according to claim 38, wherein said hematological cancer is a lymphoma and said at least ten genes are selected from:
(a) at least ten genes selected from the genes set forth in Table 32;
(b) at least ten genes selected from the genes set forth in Table 33;
(c) at least ten genes selected from the genes set forth in Table 34;
(d) at least ten genes selected from the genes set forth in Table 35;
(e) at least ten genes selected from the genes set forth in Table 36;
(f) at least ten genes selected from the genes set forth in Table 37; and
(g) at least ten genes selected from the genes set forth in Table 38.

41. The set of genes according to claim 38, wherein said hematological cancer is a leukemia and said at least ten genes are selected from:
(a) at least ten genes selected from the genes set forth in Table 39;
(b) at least ten genes selected from the genes set forth in Table 40, and
(c) at least ten genes selected from the genes set forth in Table 41.

42. A library of genes for profiling a hematological cancer, comprising the genes as set forth in Table 1.

43. A computer-readable medium comprising one or more digitally-encoded expression pattern profiles representative of the set of genes according to claim 38, each of said one or more expression pattern profiles being associated with one or more values wherein each of said one or more values is correlated with one of said one or more features of a hematological cancer.
